(19) United States
(12) Patent Application Publication
(10) Pub. No.: US 2013/0252950 A1
(43) Pub. Date: Sep. 26, 2013

(54) TARGETING MTOR SUBSTRATES IN TREATING PROLIFERATIVE DISEASES

(71) Applicants: John Blenis, Newtonville, MA (US); Steven P. Gygi, Foxborough, MA (US); Yonghao Yu, Roxbury, MA (US)

(72) Inventors: John Blenis, Newtonville, MA (US); Steven P. Gygi, Foxborough, MA (US); Yonghao Yu, Roxbury, MA (US)

(73) Assignee: President and Fellows of Harvard College, Cambridge, MA (US)

(21) Appl. No.: 13/825,723

(22) PCT Filed: Sep. 23, 2011
(86) PCT No.: PCT/US11/53035

§ 371 Date: Jun. 11, 2013

Related U.S. Application Data
(60) Provisional application No. 61/403,932, filed on Sep. 23, 2010.

(51) Int. Cl. C12Q 1/48; G01N 33/68

(52) U.S. Cl. CPC C12Q 1/485; G01N 33/68
USPC 514/232.5; 435/15; 514/291; 435/7.1; 506/9

(57) ABSTRACT

Provided are over 300 mTOR kinase targets identified by a comprehensive phosphoproteomics assay. Methods of targeting mTOR kinase targets, methods to determine the level of mTOR activity by measuring the level of phosphorylation of an mTOR targeted phosphorylation site, methods for distinguishing different classes of mTOR activity in a cell based on phosphoproteomic analysis of mTOR-targeted proteins are also provided. Also provided is the classification of a hyperproliferative disease based on phosphoproteomic analysis of mTOR-targeted proteins, as well as the personalization of therapeutic methods for the treatment of hyperproliferative disease based on phosphoproteomics. Also provided are therapeutic methods including administering to a subject an mTOR inhibitor, an mTOR inhibitor and an additional kinase inhibitor, or a dual inhibitor of mTOR and an additional kinase based on the phosphorylation levels of mTOR targets determined in the subject. Some aspects of this invention relate to the discovery that GrblO is an mTOR-targeted tumor suppressor gene.

### RELATED APPLICATIONS

[0001] This application claims priority under 35 U.S.C. §119(e) to U.S. provisional patent application, U.S. Ser. No. 61/403,932, filed Sep. 23, 2010, which is incorporated herein by reference.

### GOVERNMENT SUPPORT

[0002] This invention was made with U.S. Government support under grant numbers GM051405 and HG3456 awarded by the National Institutes of Health. The U.S. Government has certain rights in the invention.

### BACKGROUND

[0003] mTOR is an evolutionarily conserved ser/thr protein kinase that controls many critical cellular processes including growth, protein translation, metabolic flux, and cell survival. mTOR functions as the core catalytic component of two structurally and functionally distinct signaling complexes. mTOR complex 1 (mTORC1) regulates cell growth and is responsible for the well-characterized role of mTOR in controlling protein translation whereas mTOR complex 2 (mTORC2) regulates cell survival and the actin cytoskeleton (1-3). The mechanisms responsible for modulating mTORC1 and mTORC2 activity in response to upstream inputs such as growth factors, energetic status, and amino acid levels have been well studied (1). In contrast, relatively few direct substrates of mTOR have been identified and in many cases the mechanisms underlying mTOR's ability to regulate important aspects of cell biology are not known.

[0004] Misregulated mTOR activity is a common feature of most cancers (2). Despite great interest, clinical trials for evaluating the selective mTORC1 inhibitor rapamycin as an anti-cancer agent have met with limited success (3). Rapamycin resistance has emerged as a major challenge to its clinical use (4) and is caused in part by feedback loops that activate the PI3K and MAPK signaling pathways in rapamycin-treated cells through poorly understood mechanisms (5, 6).

### SUMMARY OF THE INVENTION

[0005] Functional characterization of the mTOR signaling pathways has been hampered by the paucity of substrates that have been identified to date. Identifying novel substrates of mTORC1 and mTORC2 is important for making progress toward our general understanding how mTOR signals to downstream effectors and to specifically define components of the feedback loops involved in rapamycin resistance. The best-characterized mTORC1 substrates include p70S6K and 4EBP, whereas mTORC2 phosphorylates several members of the AGC kinase family, including Akt, SGK, and PKC.

[0006] The present invention is based in part on large-scale quantitative phospho-proteomics experiments that were performed to define the entire signaling networks downstream of both mTORC1 and mTORC2. Novel mTORC1 substrates identified herein include, but are not limited to Grb10, FOXK1, ZEB2, NDRG3, LARP1, SRPK2, CDK12, MIB1, and IBTK.

[0007] Extensive characterization of a novel mTORC1 substrate, the growth factor receptor-bound protein 10 (Grb10), shows that mTORC1-mediated phosphorylation stabilizes Grb10, leading to feedback inhibition of the PI3K and MAPK pathways. In addition, Grb10 expression was shown to be frequently downregulated in a variety of cancers. Interestingly, loss of Grb10 and the well-established tumor suppressor PTEN are mutually exclusive events. Grb10 has been found to be both a novel mTORC1 substrate and a tumor suppressor with relevance across a broad spectrum of cancer subtypes.

[0008] In some aspects, the invention provides methods for determining mTOR kinase activity in a cell, the method comprising obtaining a cancer cell from a subject diagnosed to have a cancer, determining the level of Grb10 phosphorylation in the cell, and comparing the level of Grb10 phosphorylation to a reference level, wherein if the level of Grb10 phosphorylation in the cell is higher than the reference level, then the cell is determined to exhibit an elevated level of mTOR kinase activity. In some embodiments, the cell is a normal or healthy cell. In some embodiments, the cell is a cell obtained from a subject not diagnosed with a neoplastic disease. In some embodiments, the cell is a cell obtained from a subject not diagnosed with a cancer. In some embodiments, the cell is a neoplastic cell. In some embodiments, the cell is a cancer cell. In some embodiments, the cell is a cell obtained from a subject diagnosed with a neoplastic disease, for example, with a cancer.

[0009] In some aspects, the invention provides methods for selecting a treatment of a neoplastic disease, for example, of a cancer, in a subject, the method comprising obtaining a cell from a subject diagnosed to have a neoplastic disease, for example, a cancer, exhibiting an elevated level of mTOR activity; determining the level of Grb10 expression in the cell; and comparing the level of Grb10 expression to a reference level, wherein if the level of Grb10 expression in the cell is higher than the reference level, then the cell is determined to exhibit a high likelihood of expressing an elevated level of PI3K, Akt, and/or MAPK activity upon being contacted with an mTORC1 inhibitor.

[0010] Other aspects of this invention provide methods for determining mTOR kinase activity in a cell by determining the level of phosphorylation of a phosphorylation site disclosed in Table 1, 2, 3, 7, 8, or 11 in the cell, and comparing the level of phosphorylation to a reference level, wherein if the level of phosphorylation is higher than the reference level, then the cell is determined to exhibit an elevated level of mTOR kinase activity, or if the level of phosphorylation is equal or lower than the reference level, then the cell is determined to not exhibit an elevated level of mTOR kinase activity. In certain embodiments, if a phosphorylation site determined to exhibit a higher level of phosphorylation in the cell as compared to the reference level is a class I phosphorylation site, then the cell is determined to exhibit an elevated level of rapamycin-sensitive mTORC1 activity. In certain embodiments, if a phosphorylation site determined to exhibit a higher level of phosphorylation in the cell as compared to the reference level is a class II phosphorylation site, then the cell is determined to exhibit an elevated level of rapamycin-insensitive mTORC1 and/or mTORC2 activity. In some embodiments, if a phosphorylation site determined to exhibit a higher level of phosphorylation in the cell as compared to the reference level is a class III phosphorylation site, then the cell is determined to exhibit an elevated level of rapamycin-sensitive mTOR activity, or an elevated level of rapamycin-insensitive mTOR activity, or both.

[0011] In some embodiments, the methods provided herein further comprise selecting a method of treatment of the subject based on the level of phosphorylation of the phosphorylation site. In some embodiments, if the cell is determined to exhibit an elevated level of mTOR kinase activity, then a method of treatment is selected that includes administering an effective amount of an mTOR kinase inhibitor to the subject. In some embodiments, if the cell is determined to not exhibit an elevated level of mTOR kinase activity, then a method of treatment is selected that does not include administering an mTOR kinase inhibitor. In some embodiments, if the cell is determined to exhibit an elevated level of rapamycin-sensitive mTORC1 activity, then a method of treatment is selected that comprises administering an effective amount of an inhibitor of rapamycin-sensitive mTORC1 kinase activity (e.g., rapamycin or a rapamycin analog) to the subject. In some embodiments, if the cell is determined to exhibit an elevated level of rapamycin-insensitive mTORC1 and/or mTORC2 activity, then a method of treatment is selected that comprises administering an effective amount of an inhibitor of rapamycin-insensitive mTORC1 kinase activity to the subject. In some embodiments, if the cell is determined to exhibit an elevated level of rapamycin-sensitive mTOR kinase activity, or an elevated level of rapamycin-insensitive mTOR kinase activity, or both, then a method of treatment is selected that comprises administering an effective amount of an inhibitor of rapamycin-sensitive and rapamycin-insensitive mTOR kinase activity or a combination of an inhibitor of rapamycin-sensitive mTOR kinase activity and an inhibitor of rapamycin-insensitive mTOR kinase activity to the subject.

[0012] In some embodiments, the method of treatment further comprises administering to the subject an effective amount of a compound that stabilizes Grb10 or that inhibits the degradation of Grb10. In some embodiments, the method of treatment further comprises administering an effective amount of an inhibitor of PI3K, Akt, or MAPK to the subject.

[0013] Some aspects of this invention provide a phosphoproteomics array that includes a plurality of phosphosensitive antibodies or antibody fragments each of which specifically binds to phosphorylation site disclosed in Table 1, 2, 3, 7, 8, or 11. In some aspects, the invention also provides a method of using a phosphoproteomics array to determine mTOR activity in a cell by contacting a proteinaceous sample derived from a cell, for example, from a cancer cell, with a phosphoproteomics array as described herein under conditions suitable for a protein expressed in the cell to bind to an antibody or antibody fragment of the array, determining the level of phosphorylated protein bound to an antibody or antibody fragment of the array, and comparing the level of phosphorylated protein bound to an antibody or antibody fragment of the array to a reference level. If the level phosphorylated protein in the sample derived from the cell is higher than the reference level, then the cell is determined to exhibit an elevated level of mTOR kinase activity.

[0014] In other aspects, the invention provides methods of identifying an mTOR kinase inhibitor by contacting an mTOR kinase with a polypeptide with a phosphorylation site disclosed in Table 1, 2, 3, 7, 8, or 11 under conditions suitable for the mTOR kinase to phosphorylate the phosphorylation site in the presence of a candidate agent, determining the level of phosphorylation at the phosphorylation site, and comparing the level of phosphorylation to a reference level. If the level of phosphorylation is lower than the reference level, then the candidate agent is identified as an mTOR kinase inhibitor.

[0015] In some embodiments involving a phosphorylation site disclosed in Table 1, 2, 3, 7, 8, or 11, the phosphorylation site is not a phosphorylation site previously known to be an mTOR target.

[0016] The subject matter of this application may involve, in some cases, interrelated products, alternative solutions to a particular problem, and/or a plurality of different uses of a single method or agent. Other advantages, features, and uses of the invention will become apparent from the following detailed description of non-limiting embodiments of the invention when considered in conjunction with the accompanying drawings.

### BRIEF DESCRIPTION OF THE DRAWINGS

[0017] FIG. 1. Sample preparation and data analysis for quantitative phosphorylation profiling of mTOR signaling. (A) Schematics of the two quantitative mass spectrometry experiments are shown with a plot highlighting the distribution of phosphopeptides identified in each screen. See data summary in Table 5. Note that most of the phosphopeptides have a ratio of 1:1 between the light and heavy populations and hence have a value close to 0 on a Log₂ axis. Proteins with downregulated phosphorylation in each screen are highlighted in the red box. (B) Typical quantitative MS and MS/MS spectra in which LS*SLRAS*TSKSESSQK (SEQ ID NO: 1) from ribosomal protein S6 (S235 and S240) are identified as a rapamycin-sensitive phosphopeptide. Note the light and heavy peptides differ by 26 Da, corresponding to 2 labeled Lys and 1 labeled Arg in this particular peptide. Sequence in lower panel: SEQ ID NO: 1722. (C) Quantitative differences between the rapamycin-sensitive and -insensitive mTOR downstream phosphorylation events. Phosphopeptides identified in both screens were extracted and their corresponding Log₂ ratios (fold-changes) were plotted. (D) The top ten pathways enriched in the down-regulated phospho-proteins identified in the rapamycin (Rapa) screen.

[0018] FIG. 2. Phosphorylation of Grb10 at S501/S503 is sensitive to rapamycin inhibition. (A) Identification of a doubly-phosphorylated rapamycin-sensitive Grb10 peptide (MNILSS*QS*PLHPSTLNAVIHR, SEQ ID NO: 2, * indicates phosphorylation sites) corresponding to S501/S503. (B) Evolutionary conservation of Grb10 S501/S503 among vertebrate species. (C) Phosphorylation of Grb10 at S501/S503 shows rapamycin sensitivity in vivo. TSC2−/− cells were starved for serum and treated with 20 nM rapamycin for the indicated times. Sequences, from top to bottom: SEQ ID NO: 1723 to SEQ ID NO: 1727, respectively. (D) Phosphorylation of Grb10 at S501/501 is sensitive to amino acids withdrawal. TSC2−/− cells were starved in DMEM overnight and then transferred to D-PBS for the indicated times. (E) Phosphorylation of Grb10 at S501/S503 is not affected by the pan-kinase inhibitor, staurosporine. TSC2−/− cells were starved for serum and treated with either 100 nM staurosporine or Ku-0063794 at the indicated concentrations for two hours. (F) Grb10 phosphorylation is increased upon growth factor stimulation. Wild type (WT) mouse embryonic fibroblasts (MEFs) were starved for serum overnight and then were stimulated with insulin (100 nM) or serum (10%) for 15 min. The cells were preincubated with the indicated compounds for two hours. AktVIII (1 μM) is a specific inhibitor of Akt whereas AZD (AZD6244, 5 μM) specifically inhibits MEK. Rapamycin (rapa) was used at 20 nM. (G) Grb10 phosphorylation at S501/S503 is sensitive to various mTOR kinase inhibitors. TSC2−/− cells were serum-starved and treated with the indicated compounds for two hours. The concentrations of the compounds were rapamycin 20 nM, LY (LY294002) 20 μM, BEZ235 (NVP-BEZ235) 500 nM, torin 100 nM, and pp 242 1 μM.

[0019] FIG. 3. mTOR-mediated Grb10 phosphorylation is important for Grb10 stability. (A) Grb10 interacts with raptor, but not rictor. HA-tagged Grb10 was co-transfected with Myc-raptor or Myc-rictor in HEK293T cells. Cells were lysed in lysis buffer A, and the lysates were subjected to immunoprecipitation using anti-HA antibody conjugated beads. Raptor and rictor were probed with an antibody against the Myc-tag. (B) Grb10 is phosphorylated by mTOR in vitro. Recombinant Grb10 was prepared from bacteria (the GST-fused Grb10 shows a molecular weight of 80 kDa) and was incubated with recombinant mTOR in vitro. Phosphorylation of Grb10 at S501/S503 was detected by using the phospho-specific antibody against these two sites. (C) Long-term rapamycin treatment leads to Grb10 degradation in TSC2−/− cells. Note that Grb10 protein expression levels inversely correlated with Akt activity. Grb10 is highly overexpressed in TSC2−/− cells. mRNA level was determined using quantitative RT-PCR based on three biological replicate experiments. (D) Knockdown of raptor in TSC2−/− cells decreased Grb10 protein level. Cells were starved overnight and the lysates were probed with the antibodies indicated. (E) Grb10 is highly overexpressed in TSC2−/− cells. (F) S501A/S503A mutant is unstable compared with the wild-type or the S501D/S503D mutant. The same amount of DNA was transfected into HEK293T cells. (G) Rapamycin failed to induce degradation of the S501D/S503D mutant. S501D/S503D mutant (DD) was stably expressed in TSC2−/− cells and cells were treated with 20 nM rapamycin for the indicated times. Endogenous Grb10 was detected using an antibody that preferentially recognizes mouse Grb10 whereas the Grb10 DD mutant (of human origin) was detected using an anti-HA antibody.

[0020] FIG. 4. Grb10 is involved in the feedback inhibition loop from mTORC1 to PI3K and MAPK and GRB10 mRNA expression is significantly down-regulated in many cancers and is negatively correlated with PTEN expression. (A) Knockdown of Grb10 in TSC2−/− cells resulted in PI3K and MAPK hyperactivation after insulin or IGF stimulation. (B) Knockdown of Grb10 in TSC2−/− cells protected cells against apoptosis. Grb10 knockdown and control cells were starved overnight and then treated with 100 nM staurosporine for 5 hrs to induce apoptosis. (C) Box plots indicating that GRB10 expression is significantly lower in many tumor types compared to their corresponding normal tissues. (Only the tumor types that showed significantly lower GRB10 expression in cancer vs. normal in at least three independent microarray datasets are included). (D) Heat maps indicating a strong negative correlation between GRB10 and PTEN expression in breast carcinomas and myelomas. Low levels of GRB10 expression rarely occurred in tumors that also showed low levels of PTEN expression. (E) Scatter plots comparing the expression levels of GRB10 and PTEN levels in the normal and tumor samples, collected overall from 6 different tissue types, where GRB10 was shown to be significantly down-regulated in cancer vs. normal. The negative correlation between GRB10 and PTEN expression is evident in the tumor (P<0.001) but not in the corresponding normal samples.

[0021] FIG. 5. Data analysis for the rapamycin screen and Ku-0063794 screen. (A) Phosphopeptides enrichment in the second biological replicate experiment of the rapamycin screen. Number of phospho- and nonphospho-peptides, in each SCX fraction was plotted. (B) Number of downregulated proteins in the two biological replicates of the rapamycin screen. (C) Ku-0063794 inhibits insulin-induced Akt phosphorylation. (D) Pathways enriched in the downregulated phospho-proteins identified in the Ku-0063794 screen. The top ten overrepresented pathways were shown. Analysis was performed using DAVID. See Huang D W, Sherman B T, Lempicki R A. Systematic and integrative analysis of large gene lists using DAVID Bioinformatics Resources. Nature Protoc. 2009; 4(1):44-57; and Dennis G Jr, Sherman B T, Hosack D A, Yang J, Gao W, Lane H C, Lempicki R A. DAVID: Database for Annotation, Visualization, and Integrated Discovery. Genome Biol. 2003; 4(5):P3; both incorporated herein by reference for disclosure of integrative analysis methods for large datasets.

[0022] FIG. 6. Examples of protein phosphorylation changes identified in the rapamycin and Ku-0063794 screens. Note that the light cells were treated with rapamycin and the heavy cells were treated with DMSO in the rapamycin screen (2^{nd} biological replicate). For the Ku-0063794 screen, light cells were treated with rapamycin whereas the heavy cells were treated with a combination of rapamycin and Ku-0063794. (A) Phosphorylation changes of different sites on 4EBP in the rapamycin screen and Ku-0063794 screen. Phosphorylation of T36/T45 was partially responsive to rapamycin and was completely abolished as a result of Ku-0063794 treatment. In contrast, T70 phosphorylation is mTOR-independent (B) NRDG1 phosphorylation at S330/S333 was sensitive to Ku-0063794 but not rapamycin inhibition. (C) GSK3β phosphorylation at S9 decreased in both rapamycin and Ku-0063794 screen.

[0023] FIG. 7. Identification of the rapamycin-sensitive phosphorylation sites on mTOR (A) Intensities of an mTOR peptide ²⁴⁷¹AGTTVPES*HIS*FIGDGLVKPEALNKK²⁴⁹⁶ (SEQ ID NO: 3, * indicates phosphorylation sites) from the rapamycin-treated (Light) and control (Heavy) TSC2−/− cells (B) Domain structure of mTOR and conservation of S2478 and S2481 across different species. Sequences, from top to bottom: SEQ ID NO: 1728 to SEQ ID NO: 1735, respectively. (C) Immunoblot experiments showing phospho-mTOR at S2481 is inhibited by acute rapamycin treatment. TSC2−/− cells were starved and then treated with 20 nM rapamycin for the indicated times. (D) mTOR kinase inhibitor pp 242 completely ablated mTOR phosphorylation at S2481. TSC2−/− cells were starved and were then treated with 1 pp 242 for two hours.

[0024] FIG. 8. Identification of rapamycin-sensitive phosphorylation sites on Grb10. (A) MS/MS experiments identified that phosphorylation of residues S501/S503 of Grb10 is strongly inhibited by rapamycin. (B) Phosphorylation at S455/S458 is rapamycin-insensitive. Sequences, from top to bottom: SEQ ID NO: 1736 and SEQ ID NO: 1737, respectively.

[0025] FIG. 9. Phosphorylation of Grb10 at S501/S503 regulates its stability. (A) An antibody showed specificity towards Grb10 phosphorylation at S501/S503. Preincubation of the antibody with the blocking antibody completely eliminated the immunoreactivity. (B) Further validation of the phospho-specific antibody raised against the Grb10 S501/S503 sites. Grb10 WT, S501A/S503A (AA) and S501D/S503D (DD) were transfected into HEK239T cells and were probed with the antibody. Note that this antibody detected wild type (WT) Grb10, but neither of the mutant proteins. (C) Treatment of TSC2−/− cells with various mTOR kinase inhibitors led to Grb10 degradation. (D) Both rapamycin and NVP-BEZ235 treatment led to a decreased level of Grb10 in TSC1−/− cells. (E) Grb10 is highly overexpressed in TSC1−/− cells compared with their wild-type counterparts. (F) rapamycin treatment of TSC2−/− cells stably expressing wild type (WT) Grb10 led to lower levels of both endogenous and exogenous Grb10.

[0026] FIG. 10. Grb10 is involved in the feedback loop from mTORC1 to PI3K. (A) Overexpression of Grb10 in HEK293 cells inhibited PI3K activation. W, wild type (WT) Grb10, A, AA mutant and D, DD mutant. Knockdown of Grb10 in TSC2−/− cells led to IRS hyperphosphorylation after insulin stimulation. (B) Overexpression of Grb10 in HEK239 cells suppressed IRS tyrosine phosphorylation and PI3K recruitment after insulin stimulation. HA-tagged Grb10 was transfected and IRS2 immunoprecipitates were analyzed. Phosphorylation at Y612 of IRS was detected. (C) HA-tagged Grb10 was transfected and p85 immunoprecipitates were analyzed. (D) Knockdown of Grb10 in TSC2−/− cells led to increased IRS Y612 phosphorylation upon insulin stimulation. (E) Knockdown of Grb10 in TSC2−/− cells protected these cells against etoposide-induced apoptosis. Cells were starved overnight and were treated with 100 μM etoposide for the indicated times.

### DEFINITIONS

[0027] In the tables and the database, *, @, ̂ and # denote phosphorylation (Ser, Thr and Tyr), heavy Lys, heavy Arg and oxidation (Met), respectively. International Protein Index (IPI) reference numbers are given in some of the tables and the database provided herein. The IPI database can be accessed at the European Bioinformatics Institute homepage (www.ebi.ac.uk/), for example, at (www.ebi.ac.uk/IPI/IPIhelp.html). Each IPI database entry provided by accession number is incorporated herein by reference for disclosure of the respective proteins amino acid sequence and accompanying protein information.

[0028] The term “antibody,” as used herein, refers to an immunoglobulin, whether natural or wholly or partially synthetically produced. All derivatives thereof which maintain specific binding ability are also included in the term. The term also covers any protein having a binding domain which is homologous or largely homologous to an immunoglobulin binding domain. These proteins may be derived from natural sources, or partly or wholly synthetically produced. An antibody may be monoclonal or polyclonal. The antibody may be a member of any immunoglobulin class, including any of the human classes:IgG, IgM, IgA, IgD, and IgE. Derivatives of the IgG class, however, are preferred in the present invention.

[0029] The term “antibody fragment,” as used herein, refers to any derivative of an antibody which is less than full-length. Preferably, the antibody fragment retains at least a significant portion of the full-length antibody's specific binding ability. Examples of antibody fragments include, but are not limited to, Fab, Fab′, F(ab′)₂, scFv, Fv, dsFv, diabody, and Fd fragments. The antibody fragment may be produced by any means. For instance, the antibody fragment may be enzymatically or chemically produced by fragmentation of an intact antibody or it may be recombinantly produced from a gene encoding the partial antibody sequence. Alternatively, the antibody fragment may be wholly or partially synthetically produced. The antibody fragment may optionally be a single chain antibody fragment. Alternatively, the fragment may comprise multiple chains which are linked together, for instance, by disulfide linkages. The fragment may also optionally be a multimolecular complex. A functional antibody fragment will typically comprise at least about 50 amino acids and more typically will comprise at least about 200 amino acids.

[0030] Single-chain Fvs (scFvs) are recombinant antibody fragments consisting of only the variable light chain (V_{L}) and variable heavy chain (V_{H}) covalently connected to one another by a polypeptide linker. Either V_{L} or V_{H} may be the NH₂-terminal domain. The polypeptide linker may be of variable length and composition so long as the two variable domains are bridged without serious steric interference. Typically, the linkers are comprised primarily of stretches of glycine and serine residues with some glutamic acid or lysine residues interspersed for solubility.

[0031] Diabodies are dimeric scFvs. The components of diabodies typically have shorter peptide linkers than most scFvs, and they show a preference for associating as dimers.

[0032] An Fv fragment is an antibody fragment which consists of one V_{H} and one V_{L} domain held together by noncovalent interactions. The term dsFv is used herein to refer to an Fv with an engineered intermolecular disulfide bond to stabilize the V_{H}-V_{L} pair.

[0033] A F(ab′)₂ fragment is an antibody fragment essentially equivalent to that obtained from immunoglobulins (typically IgG) by digestion with an enzyme pepsin at pH 4.0-4.5. The fragment may be recombinantly produced.

[0034] A Fab fragment is an antibody fragment essentially equivalent to that obtained by reduction of the disulfide bridge or bridges joining the two heavy chain pieces in the F(ab′)₂ fragment. The Fab′ fragment may be recombinantly produced.

[0035] A Fab fragment is an antibody fragment essentially equivalent to that obtained by digestion of immunoglobulins (typically IgG) with the enzyme papain. The Fab fragment may be recombinantly produced. The heavy chain segment of the Fab fragment is the Fd piece.

[0036] The term “binding agent”, as used herein, refers to an agent binding a target molecule, for example, a polypeptide comprising a phosphorylation site provided herein, with high specificity. Examples of binding agents are antibodies, antibody fragments, aptamers, and adnectins.

[0037] The term “phosphosensitive”, as used herein in the context of a binding agent, refers to a binding agent that specifically binds to a phosphorylation site, for example, a phosphorylation site provided herein, in either the phosphorylated or non-phosphorylated state. In some embodiments, a phosphosensitive binding agent provided herein binds to the phosphorylation site in its phosphorylated state, but does not significantly bind the phosphorylation site in a non-phosphorylated state. Phosphosensitive binding agents, for example, phosphosensitive antibodies or antibody fragments, accordingly, allow for the detection of phosphorylation at a specific phosphorylation site.

[0038] The term “cancer”, as used herein, refers to a malignant neoplastic disease. Most cancers are characterized by hyperproliferation of a cell population. In some embodiments, a cancer manifests as a solid tumor. In some embodiments, a cancer manifests as a liquid tumor. Non-limiting examples of cancers include carcinomas (derived from epithelial cells, e.g., some forms of breast, prostate, lung and colon cancer), sarcomas (derived from connective tissue or mesenchymal cells), lymphoma and leukemia (derived from hematopoietic cells) and seminomas (derived from germ cells).

[0039] The term “cancer cell”, as used herein, refers to a malignant neoplastic cell. In some embodiments, a cancer cell is part of a neoplastic cell population. In some embodiments, a cancer cell is a cell of a solid tumor. In some embodiments, a cancer cell is a cell of a liquid tumor. In some embodiments, a cancer cell carries a mutation that affects regulation of cell cycle control. In some embodiments, a cancer cell is a cell obtained from a tumor in a subject.

[0040] The term “candidate agent”, as used herein refers to a molecule to be tested for a specific property, for example, for its ability to inhibit mTOR kinase activity. In some embodiments, a candidate agent is a small molecule. In some embodiments, a candidate agent is a polypeptide or protein. In some embodiments, a candidate agent is a binding agent. In some embodiments, a candidate agent is a nucleic acid.

[0041] The term “determining a level of expression”, as used herein, refers to performing an assay to determine the level of a gene product expressed in a cell or tissue, for example, in a cancer cell or tumor tissue. In some embodiments, the assay includes obtaining a cell from a subject, for example, by biopsy. In some embodiments, the gene product is a transcript, for example, an mRNA. In other embodiments, the gene product is a protein, for example, an mTOR substrate disclosed herein, or a protein comprising a phosphorylation site disclosed herein. In some embodiments, the gene product is a protein that is phosphorylated at a specific phosphorylation site. In some embodiments, the gene product is a protein that is not phosphorylated at a specific phosphorylation site. Methods, assays, and reagents to determine the level of a gene product in a cell or tissue are described herein and are well known to those of skill in the art. See, for example, Sambrook et al., Molecular Cloning, second edition, Cold Spring Harbor Laboratory, Plainview, N.Y.; (1989), or Ausubel et al., Current Protocols in Molecular Biology, Current Protocols (1989), and DNA Cloning: A Practical Approach, Volumes I and II (ed. D. N. Glover) IREL Press, Oxford, (1985); each of which is incorporated herein by reference.

[0042] Methods to determine transcript levels include, for example, RT-PCR, northern blot, in situ hybridization, microarray assays, and massive parallel sequencing assays. Methods to determine protein levels include, for example, western blot, immunohistochemistry, ELISA, protein array assays, and mass spectrometry.

[0043] The term “high risk of expressing an elevated level of PI3K, Akt, and/or MAPK activity”, as used herein in the context of cells, refers to a condition in a cell that is likely to result in upregulation of PI3K, Akt, and/or MAPK kinase activity, when the cell is contacted with a therapeutic agent, for example, with an mTOR inhibitor. The term “risk” is used interchangeably with the term “likelihood” in this context. Such risk can be conferred through feedback-relief triggered by the therapeutic target. For example, in some embodiments, a cell, for example, a cell derived from a tumor in a subject, is determined to have a high likelihood of expressing an elevated level of PI3K, Akt, and/or MAPK, if it is established that the cell highly expresses a feedback-mediator, for example, phosphorylated Grb10, that limits PI3K, Akt, and/or MAPK expression. If the feedback-mediator is a known substrate of an oncogenic kinase, for example, if the feedback-mediator is the mTOR kinase substrate Grb10, then the cell is likely to exhibit feedback relief upon administration of an inhibitor of the kinase, for example, an mTOR kinase inhibitor, which, in turn, may increase the cell's proliferation and/or survival capacity.

[0044] The term “inhibitor” as used herein in the context of kinases, refers to a molecule that inhibits the activity of a kinase. In some embodiments, an inhibitor diminishes the catalytic activity of a kinase. In some embodiments, an inhibitor abolishes the catalytic activity of a kinase. In some embodiments, the inhibitor is a small molecule. In some embodiments, the inhibitor is a nucleic acid or a polypeptide. In some embodiments, the inhibitor is a binding agent. In some embodiments, a kinase inhibitor effects inhibition by down-regulating expression of the kinase. In some embodiments, a kinase inhibitor effects inhibition by binding the kinase and interfering with the kinase reaction. In some embodiments, a kinase inhibitor is an allosteric kinase inhibitor. The term “allosteric kinase inhibitor” refers to a kinase inhibitor, for example, a small molecule, that binds its target kinase, wherein the binding of the inhibitor results in an allosteric change in the kinase molecule, leading to diminished kinase activity. Allosteric changes leading to diminished kinase activity can be changes resulting in a reduction of the kinase's ability to bind a substrate molecule, or changes resulting in a reduction of the kinases ability to transfer a phosphate group to a substrate molecule. In some embodiments, the kinase inhibitor is a catalytic kinase inhibitor. In some embodiments, a catalytic inhibitor, which itself cannot partake in a kinase reaction, competes with a kinase substrate for binding. In some embodiments, a catalytic kinase inhibitor is an ATP-competitive inhibitor.

[0045] The term “effective amount”, as used herein in the context of kinase inhibitors, refers to an amount of kinase inhibitor sufficient to achieve a measurable inhibition of kinase activity, or an amount of kinase inhibitor sufficient to achieve a clinically desirable outcome. For example, an effective amount of the mTOR inhibitor rapamycin is, in some embodiments, an amount of rapamycin that, when administered to a cell or tissue, results in a measurable decrease in mTOR kinase activity in the cell or tissue. In some embodiments, an effective amount of a kinase inhibitor is an amount that is effective to reduce the activity of the target kinase in a cell or tissue to less than 75%, less than 50%, less than 40%, less than 30%, less than 25%, less than 20%, less than 10%, less than 5%, less than 2.5%, less than 2%, or less than 1% of the activity in the cell or tissue not treated with the inhibitor. Assays for measuring kinase activity are well known in the art and described in more detail elsewhere herein. In some embodiments, an effective amount of a kinase inhibitor, for example, of rapamycin, is an amount that, when administered to a subject, for example, a subject having a cancer with elevated mTOR activity, results in a clinically desirable outcome. In some embodiments, a clinically desirable outcome is reversal of a disease, for example, a decrease in neoplastic or malignant cell number, tumor size, or cell proliferation rate, for example, in a subject having a proliferative disease, e.g., a neoplastic disease or a cancer, or a delay in the progression of a disease, for example a progression from one tumor stage to the next, or from a benign to a malignant neoplastic disease.

[0046] The term “mTOR kinase inhibitor” as used herein, refers to a molecule inhibiting a kinase activity of the mTOR kinase. Examples of mTOR kinase inhibitors are mTORC1 kinase inhibitors and mTORC1/2 inhibitors. Examples of mTORC1 kinase inhibitors are rapamycin and rapamycin analogs (e.g., Ridaforolimus, Sirolimus or Everolimus). Examples of mTORC1/2 inhibitors are PP242, PP30, AZD8055, OSI-027, WYE354, INK-128, XL388, and torin1. Further examples of mTOR inhibitors are inhibitors that target mTOR and an additional kinase or additional kinases, for example, dual PI3K/mTOR kinase inhibitors (e.g., NVP-BEZ235, BGT-226, XL-765, GSK2126458, or SF1126).

[0047] The term “PI3K kinase inhibitor”, as used herein, refers to a molecule that inhibits PI3K kinase activity. Examples of PI3K inhibitors are ZSTK474, TGX221, GDC0941, LY294002, XL147, PX147, BKM120, GSK 615, CAL101, and PX-866.

[0048] The term “mutation”, as used herein, refers to a change in a gene sequence, for example, a deletion, insertion, inversion, transposition, or substitution. In some embodiments, the mutation results in a change of the expression level of the gene product encoded by the respective gene. In some embodiments, a mutation is a mutation in a gene involved in an mTOR signaling pathway, for example, a gene encoding a protein that regulates, directly or indirectly, mTOR kinase activity. Examples of genes involved in an mTOR signaling pathway are Ras, Raf, MAPK, RSK, receptor tyrosine kinases, PI3K (Phosphoinositide 3-kinase), PTEN (phosphatase and tensin homolog), Akt (Protein Kinase B), TSC1/2 (Tuberous sclerosis protein 1, Tuberous sclerosis protein 2, respectively), MEK (Dual specificity mitogen-activated protein kinase kinase 1, MAPK21), LKB (, and NF2 (Neurofibromatosis 2). Methods to determine whether a cell carries a mutation in a gene are well known to those of skill in the related arts.

[0049] The term “phosphoproteomic profile”, as used herein, refers to a dataset comprising information regarding the level of phosphorylation of a plurality of phosphorylation sites in a biological sample, for example, a proteinaceous sample derived from a cell or tissue sample. Phosphoproteomic profiles of multiple samples can be compared and similarities and dissimilarities in such profiles can be detected and quantified by methods well known to those of skill in the art, including, but not limited to, supervised and non-supervised learning, hierarchical clustering, nearest neighbor analysis. In some embodiments, a phosphoproteomics profile of a clinical sample, for example, of a sample derived from a malignant cell or tissue sample of a subject is compared to a reference sample from healthy cells or tissue, for example, to determine aberrations in protein phosphorylation in the malignant cell or tissue sample. In some embodiments, a phosphoproteomics profile of a clinical sample at issue is compared to phosphoproteomics profiles of clinical samples of known character, for example, to classify the clinical sample at issue. Phosphoproteomic profiles can be classified by methods well known in the art, including the building and application of predictors for the classification.

[0050] The term “phosphorylation level”, as used herein, refers to the proportion of phosphorylated polypeptides carrying a certain phosphorylation site in a sample relation to all polypeptides carrying the phosphorylation site in the sample. For example, if the total number of polypeptides carrying a specific phosphorylation site in a sample is 10, and 3 of these proteins are phosphorylated at that site, while 7 are not, then the phosphorylation level of this phosphorylation site in the sample would be 30%. Phosphorylation levels can be detected and quantified by methods known to those in the art, for example, by protein detection using phosphosensitive binding agents, e.g., phosphosensitive antibodies or antibody fragments. Most protein quantitation methods known to those of skill in the art do not allow for precise molecule counting, so phosphorylation levels are often approximated based on estimations of the number or fractions of phosphorylated proteins in a sample, for example, after western blot or protein microarray analysis using phosphosensitive antibodies or antibody fragments.

[0051] The term “phosphorylation site”, as used herein, refers to an amino acid residue within an amino acid sequence, or motif, that can be phosphorylated, for example, by a kinase targeting the respective site. A phosphorylation site is a substrate of a kinase if it can be phosphorylated by that kinase. For example, 5421 and S432 are phosphorylation sites in Grb10 isoform 3 within the motif MSNILSS*QS*PLHPSTLNAVIHR (SEQ ID NO: 4), and are both mTOR substrates, as described elsewhere herein. mTOR phosphorylation sites can further be classified into three classes, as used herein. The term “class I phosphorylation site”, as used herein, refers to a phosphorylation site that is targeted by rapamycin-sensitive mTORC1 activity. The term “class II phosphorylation site,” as used herein, refers to a phosphorylation site that is targeted by rapamycin-insensitive mTORC1 and/or mTORC2 activity. The term “class III phosphorylation site,” as used herein, refers to a phosphorylation site that is targeted by rapamycin-sensitive mTOR activity, rapamycin-insensitive mTOR activity, or both.

[0052] The term “proliferative disease,” as used herein, refers to any disease in which cell or tissue homeostasis is disturbed in that a cell or cell population exhibits an abnormally elevated proliferation rate. Proliferative diseases include hyperproliferative diseases, such as pre-neoplastic hyperplastic conditions and neoplastic diseases. Neoplastic diseases are characterized by an abnormal proliferation of cells and include both benign and malignant neoplasias. Malignant neoplasia is also referred to a s cancer.

[0053] The term “reference”, interchangeably used with the term “control” herein, refers to a value, sample, or parameter that serves as a baseline for comparing a value, sample, or parameter of interest to. The use of a reference can be of value in many methods that allow for the detection of absolute levels, for example, of expression, phosphorylation, or protein binding, and is essential in methods that yield semi-quantitative or relative results. Comparing an assay result obtained for a cell or tissue in question, for example, a cell or tissue obtained from a tumor in a subject, to a reference result allows a determination whether the result is abnormal. Depending on their nature, abnormal results can support the inference of specific molecular or cellular aberrations and, in some embodiments, a selection of a course of treatment over another. In some embodiments, a reference value is obtained from cells of the same cell type or the same tissue of origin as the cell in question. For example, in some embodiments, a diseased and a healthy cell is obtained from a subject, and the cells are assayed by methods provided herein in parallel. The value observed in the healthy cell, for example, a level of phosphorylation of a protein then typically serves as the reference level to which the level observed in the cell in question is compared. In other embodiments, the reference level is an average level observed or expected in normal cells. In some embodiments, the reference level is a range typically observed in healthy cells. A suitable reference depends, of course, on the type of assay and sample involved. A suitable reference for a given assay or sample will readily be apparent to those of skill in the art. The following list of exemplary references is for illustration only, since the invention is not limited in this respect.

[0054] In some embodiments, a suitable reference level, for example, a suitable reference phosphorylation or expression level, is a level observed or expected in a healthy cell or tissue of the same type as the cell or tissue in question. In some embodiments, for example, in some embodiments where a tumor biopsy is assayed, a suitable reference level is a level observed or expected in healthy cells or tissue of the same tissue the tumor originated from, or in cells or tissue adjacent to the tumor. In some embodiments, for example, in some embodiments where a cell is assayed, a reference cell is a healthy cell that is of the same cell type or tissue of origin as the cell in question. In some embodiments, a reference cell is a cell exhibiting normal mTOR kinase activity. In some embodiments, a reference cell is a malignant cell of known phenotype, for example, a malignant cell known to exhibit elevated mTOR kinase activity, a cell known to exhibit elevated mTORC1 kinase activity, or a cell known to exhibit elevated mTORC1/2 kinase activity. In some embodiments, a reference cell is a malignant cell of known phenotype, for example, a rapamycin-sensitive cancer cell or a rapamycin-sensitive cancer cell.

[0055] In some embodiments, a suitable reference level is an average level calculated or approximated from historic data. In some embodiments, a reference level is a level obtained from a reference cell or tissue assayed in parallel to the cell or tissue in question. In some embodiments, a level obtained from a cell or tissue sample is determined to be different (higher or lower) than the reference level, if it is statistically significantly different (higher or lower) than the reference level. In some embodiments, a level obtained from a cell or tissue sample is determined to be higher than the reference level, if the level is at least about 1.25-fold, at least about 1.5-fold, at least about 2-fold, at least about 3-fold, at least about 5-fold, or at least about 10-fold the reference level. In some embodiments, a level obtained from a cell or tissue sample is determined to be lower than the reference level, if it is less than about 0.75-fold, less than about 0.70-fold, less than about 0.60-fold, less than about 0.50-fold, less than about 0.40-fold, less than about 0.30-fold, less than about 0.25-fold, less than about 0.10-fold, less than about 0.05-fold, or less than about 0.01-fold the reference level. In some embodiments, a level obtained from a cell or tissue is determined to be substantially similar to the reference level, if it is not statistically significantly different from the reference level. In some embodiments, a level obtained from a cell or tissue is determined to be substantially similar to a reference level, if it is within the range of 0.75-fold to 1.25-fold of the reference level. In some embodiments, a profile comprising a plurality of levels obtained from a cell or tissue sample is determined to be substantially similar to a reference profile, if the profiles cluster together in a clustering analysis. In some embodiments, a multi-value profile obtained from a cell or tissue is determined to be substantially similar to a reference profile, if the correlation coefficient between the profiles is at least 0.75, at least 0.8, at least 0.85, at least 0.9, at least 0.91, at least 0.92, at least 0.93, at least 0.94, at least 0.95, at least 0.96, at least 0.97, at least 0.98, or at least 0.99.

[0056] The term “sample”, as used herein, refers to a biological sample. A biological sample typically comprises a cell or tissue, or biological material derived from a cell or tissue. Examples of biological samples are cell samples and tissue samples obtained from a subject, for example, from a subject having a cancer, cell or tissue cultures, and extracts or preparations obtained from any such samples, for example, protein extracts, isolated proteins or isolated nucleic acids obtained from such samples.

[0057] A “proteinaceous” sample is a sample comprising proteins or fragments of proteins. In some embodiments, a proteinaceous sample is a sample derived from a cell that includes proteins or fragments of proteins expressed in the cell. In some embodiments, the sample includes a lysed cell. In some embodiments, the sample includes proteins isolated from a cell. In some embodiments, the sample includes an isolated, enriched, or purified protein fraction from a cell, for example, a protein fraction obtained by methods described herein or known to those of skill in the art to separate nucleic acids, carbohydrates, and/or lipids from proteins or fractions of proteins. In some embodiments, the sample is prepared under conditions suitable for obtaining native proteins from a cell. In some embodiments, the sample is prepared under conditions that do not significantly affect native protein phosphorylation patterns. In some embodiments, the sample is prepared under conditions that do not significantly affect the antigenic structure of a phosphorylation site identified herein, for example, a phosphorylation site identified herein to be a target of mTOR kinase activity. In some embodiments, the sample is prepared under conditions suitable for obtaining denatured or fragmented proteins.

[0058] The term “subject,” as used herein, refers to an individual mammal. In some embodiments, the subject is a human. In some embodiments, the subject is a non-human mammal. In some embodiments, the subject is a non-human primate. In some embodiments, the subject is a rodent. In some embodiments, the subject is a sheep, a goat, a cattle, a cat, or a dog. In some embodiments, the subject is a subject diagnosed to have a cancer. In some embodiments, the subject is a subject diagnosed to have a cancer that exhibits an elevated level of mTOR kinase activity. In some embodiments, the subject is a subject not diagnosed with a cancer.

[0059] The term “target,” as used herein in the context of kinases, refers to a substrate of a kinase. The term can, accordingly, refer to a protein (e.g., Grb10 is a target of mTOR kinase), to an amino acid sequence comprising a phosphorylation site (e.g., MNILSS*QS*PLHPSTLNAVIHR (SEQ ID NO: 5) or MNILGS*QS*PLHPSTLSTVIHR (SEQ ID NO: 6) are target sequences of mTOR), or to an amino acid residue (e.g. S421 and S423 of mouse Grb10, isoform 3, are targets of mTOR).

[0060] The term “tumor,” as used herein, refers to a neoplasm or a solid lesion formed by neoplastic cells. A tumor can be benign, pre-malignant, or malignant. In some embodiments, the tumor is a malignant tumor.

[0061] The term “treatment”, interchangeably used herein with the term “therapy,” as used herein, refers to a clinical intervention aimed to prevent or to ameliorate a disease or condition in a subject. In some embodiments, a treatment is aimed to ameliorate an existing condition, for example, a cancer in a subject. In some embodiments, a treatment is aimed to prevent a condition from occurring or from recurring. For example, in some embodiments, an mTOR kinase inhibitor is administered to a subject having a cancer exhibiting an elevated level of mTOR activity in order to inhibit cell proliferation in the malignant cells. For another example, in some embodiments, an mTOR kinase inhibitor is administered to a subject having a cancer exhibiting an elevated level of mTOR activity after a malignant tumor has been removed from the subject, in order to prevent or delay recurrence of the disease. The foregoing examples are non-limiting, and those of skill in the art will readily envision further scenarios of treatment as the invention is not limited in this respect. Some embodiments include a choice of treatment, referring to a selection of a clinical intervention from a number of alternatives, or to a design of a clinical intervention to meet the specific needs of an individual subject. In some embodiments, a choice of treatment involves the design of a personalized therapeutic approach for a subject having a cancer exhibiting elevated mTOR activity based on the results from diagnostic methods provided herein. For example, in some embodiments, a choice of treatment includes administering to a subject having cancer a specific mTOR inhibitor in combination with an additional kinase inhibitor targeting an mTOR feedback-inhibited pathway based on a determination that cancer cells in the subject exhibit high mTOR activity and elevated levels of a feedback-inhibitor targeted by mTOR in order to avoid feedback relief. In some embodiments, a choice of treatment includes the determination of an appropriate treatment. Some embodiments further include carrying out the selected treatment.

### DETAILED DESCRIPTION OF CERTAIN EMBODIMENTS

[0062] This invention relates to the identification of proteins and sites on those proteins that are phosphorylated by mTOR kinase. Some aspects of this invention relate to the surprising discovery that some proteins that are substrates of mTOR kinase regulate mTOR upstream signaling pathways, thus providing feedback regulatory circuits. Some aspects of this invention relate to methods of classifying cells, for example, neoplastic cells or cancer cells, based on the phosphorylation status of mTOR targets. Some aspects of this invention relate to methods of personalized treatment of subjects having a proliferative disease, for example, a neoplastic disease or a cancer, exhibiting elevated mTOR signaling based on the phosphorylation status of mTOR targets in the diseased cells. Other aspects of this invention relate to methods and materials for the generation of phosphoproteomics profiles that include phosphorylation data for a plurality of mTOR targets. Some aspects of this invention relate to classification of cells or tissues, for example, tumor cells or tissues, based on phosphoproteomic data, for example, based on phosphoproteomic profiles of the cells or tissues. Some aspects of this invention relate to methods of identifying mTOR kinase inhibitors by identifying compounds able to interfere with mTOR kinase activity towards one or more of the mTOR targets provided herein. Some aspects of this invention relate to the identification of Grb10 as a target of mTOR kinase activity, and to methods for determining the level of mTOR activity in a cell based on Grb10 phosphorylation status. Some aspects of this invention relate to the surprising discovery that Grb10 is not only a target of mTOR kinase activity, but also an inhibitor of PI3K kinase activity. Since PI3K is a positive regulator of mTOR kinase activity, Grb10 has been identified as a mediator of mTOR feedback inhibition herein. Other aspects of this invention relate to the surprising discovery that Grb10 and PTEN mutations are mutually exclusive in certain types of tumor cells. Accordingly, some aspects of this invention relate to the surprising discovery that Grb10 is a tumor suppressor and that Grb10 phosphorylation is a useful biomarker for determining mTOR kinase activity in cells, and particularly in tumor cells. Other aspects of this invention relate to methods and reagents useful for determining the phosphorylation status of a protein or phosphorylation site identified to be an mTOR target herein. For example, some aspects of this invention provide phosphosensitive antibodies or antibody fragments specifically binding an mTOR kinase target site identified herein in either the phosphorylated or the non-phosphorylated state, thus allowing for a determination of the phosphorylation state of such a site in a cell.

mTOR Target Proteins and Sites
Identification of mTOR Target Sites

[0063] Some aspects of this invention relate to the identification of proteins and phosphorylation sites thereon as downstream targets of mTOR kinase activity. Targets of mTOR kinase activity are provided in Tables 1 and 2.

Classification of mTOR Targets

[0064] Some aspects of this invention relate to the classification of mTOR target phosphorylation sites provided herein as class I (targets of rapamycin-sensitive mTORC1 kinase signaling), class II (targets of rapamycin-insensitive mTORC1 or mTORC2 signaling), and class III (targets of both rapamycin-sensitive and rapamycin-insensitive mTOR signaling) phosphorylation sites.

[0065] This classification is useful to determine the type(s) of mTOR signaling exhibited by a cell or tissue and can support a classification of cells that are targeted for therapy, for example, of cancer cells. For example, in some embodiments, the phosphorylation status of an mTOR target is determined in a cancer cell obtained from a subject with a cancer exhibiting elevated mTOR kinase activity. Classification of the type of mTOR signaling can, in some embodiments, be a basis for the selection of an appropriate therapeutic approach. For example, if it is determined that a class I target of mTOR signaling is phosphorylated, then the elevated mTOR kinase activity is rapamycin-sensitive mTORC1 kinase activity. In some such embodiments, a method of treatment is then typically selected that includes administration of an inhibitor of rapamycin-sensitive mTORC1 signaling, for example, rapamycin or a rapamycin analog.

[0066] To give but another example: if it is determined that a class II target of mTOR signaling is phosphorylated, then the elevated mTOR kinase activity is rapamycin-insensitive mTORC1 or mTORC2 kinase activity. In some such embodiments, a method of treatment is then typically selected that includes administration of an mTORC1/2 inhibitor as provided herein. In some embodiments where class I targets of mTOR signaling are found to not be phosphorylated, a method of treatment is typically selected that does not include administration of an mTORC1 inhibitor.

[0067] To give a third example: if it is determined that a class III target of mTOR signaling is phosphorylated, then a method of treatment is selected that includes administration of an mTORC1 inhibitor and an mTORC1/2 inhibitor as provided herein. In some embodiments, a method of treatment that includes administering an mTORC1 inhibitor or an mTORC1/2 inhibitor alone may be inappropriate.

[0068] Further, some aspects of this invention provide methods to analyze gene ontology distributions in sets of mTOR targets, for example, in order to determine whether a specific signaling pathway is targeted by mTOR in a given cell, or a given therapeutic or experimental scenario.

Exemplary Proteins Identified in the Rapamycin Phosphoproteomic Screen as Targets of mTORC1 Signaling.

[0069] The phosphoproteomic screen described herein identified numerous proteins as mTOR targets, for example, as mTORC1 targets. As described in more detail elsewhere herein, the expression, expression level, phosphorylation, or phosphorylation level of one or more of such mTOR target proteins, for example, the proteins described in any of tables 1-3, or the level of phosphorylation of their respective phosphorylation sites, is employed, in some embodiments, as a biomarker for monitoring or diagnosing disease. In some embodiments, the mTOR target proteins disclosed herein, for example, the mTORC1 target proteins described in any of tables 1-3, are used in pharmaceutical screens as drug targets for the development of drugs modulating mTOR pathway downstream effects. Some exemplary mTORC1 target proteins identified herein are described in more detail below. These descriptions of exemplary mTOR target proteins are for illustration of some aspects of this disclosure and are not meant to limit the scope of the invention. Grb10, one of the mTORC1 protein targets identified in the phosphoproteomics screen, is described in more detail elsewhere herein. Briefly, Grb10, also known as growth factor receptor-bound protein 10, is stabilized by mTORC1-mediated phosphorylation, which, in turn, results in feedback inhibition of the PI3K and MAPK pathways. This is consistent with Grb10 expression being frequently downregulated in a variety of cancers. Grb10 is a tumor suppressor with relevance across a broad spectrum of cancer subtypes, and the identification of Grb10 as an mTORC1 substrate links mTORC1 activity to cancers with aberrantly low Grb10 expression or stability. Accordingly, some embodiments provide Grb10 phosphorylation as a biomarker for mTORC1 activity in a cell, tissue, or sample of interest. Methods of using Grb10 expression or phosphorylation assays to monitor mTORC1 activity in a cell, tissue, or sample of interest are also provided. For example, some embodiments provide a method of monitoring the efficacy of a drug on mTORC1 activity in a cell, tissue, or sample, by measuring Grb10 expression or phosphorylation levels. In some embodiments, such assessments are used to diagnose or monitor a disease associated with aberrant levels of mTORC1 activity, for example, cancer, or to adjust a drug dosage, for example, to the minimal dosage necessary to achieve a target mTORC1 activity level, or to choose a suitable drug modulating mTORC1 activity from a plurality of drugs, for example, the drug that shows the highest efficacy at a given dose.

[0070] Some of the mTORC1 protein targets identified herein are potential regulators of gene expression. For example, FOXK1 (Forkhead box protein K1), also known to those of skill in the art as MNF, or MNF (myocyte nuclear factor)-beta, is a winged-helix protein expressed selectively and transiently in myogenic precursor cells of the heart and skeletal muscles, and collaborates with proteins of the mammalian Sin3 (mSin3) family to repress transcription. Mutated forms of MNF-beta that fail to bind mSin3 are defective in transcriptional repression and in negative growth regulation, an overexpression phenotype revealed in oncogenic transformation assays. These phenotypic traits associated with MNF-beta dysfunction are consistent with the mTORC1 phenotype.

[0071] For another example, ZEB2 (Zinc finger E-box-binding homeobox 2) belongs to the ZEB family of zinc finger transcription factors, which are essential regulators of gene expression during normal embryonic development. ZEB proteins induce epithelial to mesenchymal transition (EMT), a process in which epithelial cells become migratory mesenchymal cells. E-cadherin is a major target gene of ZEB transcriptional repressors, and e-cadherin downregulation is considered a hallmark of EMT. In recent years, the involvement of the ZEB proteins in pathological contexts has been documented as well. For example, ZEB proteins play an important role in mediating Ras-induced EMT in breast epithelial cells. Mutations in ZEB encoding genes cause severe syndromic malformations, and are implicated in malignant tumor progression. Without wishing to be bound by theory, ZEB2 is believed to be a critical target in lymphangioleiomyomatosis (LAM) that represents the point of convergence of the mTORC1 and ERK-MAP kinase pathways that are critical to this disease.

[0072] For another example, NDRG3 is the downstream target of N-Myc. Phosphorylation of NDRG3 links mTOR signaling pathway to Myc activity as an oncogenic transcription factor.

[0073] Accordingly, some embodiments provide FOXK1, ZEB2, and/or NDRG3 phosphorylation as a biomarker for mTORC1 activity in a cell, tissue, or sample of interest. Methods of using FOXK1, ZEB2, and/or NDRG3 expression or phosphorylation assays and levels useful for monitoring mTORC1 activity in a cell, tissue, or sample of interest are also provided. For example, some embodiments provide a method of monitoring the efficacy of a drug on mTORC1 activity in a cell, tissue, or sample, by measuring FOXK1, ZEB2, and/or NDRG3 expression or phosphorylation levels. In some embodiments, such assessments are used to monitor or diagnose a disease associated with aberrant mTORC1 activity, as manifest by aberrant FOXK1, ZEB2, and/or NDRG3 phosphorylation level(s), and/or to adjust a drug dosage, for example, to the minimal dosage necessary to achieve a target mTORC I activity level, or to choose a suitable drug modulating mTORC1 activity from a plurality of drugs, for example, the drug that exhibits the highest efficacy at a given dose.

[0074] Some of the mTORC1 protein targets identified herein are regulators of mRNA synthesis, mRNA processing, and protein synthesis. This is consistent with the role mTORC1 activity plays in the control of cell growth, which, if improperly regulated, can contribute to tumor genesis and/or growth. For example, LARP1 binds mRNA in vitro via both the La motif and the LARP1 domain. LARP-1 also down-regulates the Ras-MAPK pathway. Accordingly, without wishing to be bound by any particular theory, LARP1 phosphorylation represents an mTORC1-dependent regulation of this feedback loop. The LARP-1 protein colocalizes with P bodies, which function in RNA degradation, and it is believed that the cluster of LARP-1 homologs functions to control the expression of key developmental regulators. Without wishing to be bound by any particular theory, some aspects of this invention provide that LARP-1 functions in P-bodies to attenuate the abundance of Ras-MAPK pathway-regulated mRNAs.

[0075] For another example, EDC3 is associated with an mRNA-decapping complex required for removal of the 5′-cap from mRNA prior to its degradation from the 5″-end.

[0076] For another example, SRPK2 is involved in SR protein phosphorylation, which influences other aspects of mRNA metabolism, such as splice site selection (alternative splicing), mRNA export, nonsense-mediated decay (NMD), and translation efficiency. Accordingly, some aspects of this disclosure provide that SRPK2 links mTOR/S6K signaling to SR protein activity.

[0077] Another example of an MTORC1 target identified herein that regulates mRNA synthesis and processing is CDK12-(CDC2-related kinase, arginine/serine-rich). CDK12 is involved in the regulation of alternative mRNA splicing. Without wishing to be bound by any particular theory, it is believed that, similar to SRPK2, CDK12 is also involved in regulating mRNA splicing by mTOR signaling. A CDK12-binding partner, cyclin-L1 (CCNL1), is also identified as an mTORC1 target protein herein. Without wishing to be bound by any particular theory, similar to SRPK and CDK12, CCNL1 may contribute to mRNA biogenesis and cell proliferation.

[0078] Accordingly, some embodiments provide LARP1, SRPK2, and/or CDK12 phosphorylation as a biomarker for mTORC1 activity in a cell, tissue, or sample of interest. Methods of using LARP1, SRPK2, and/or CDK12 expression or phosphorylation levels to monitor mTORC1 activity in a cell, tissue, or sample of interest are also provided. For example, some embodiments provide a method of monitoring the efficacy of a drug on mTORC1 activity in a cell, tissue, or sample, by measuring LARP1, SRPK2, and/or CDK12 expression or phosphorylation levels. In some embodiments, such assessments are used to monitor or diagnose a disease associated with aberrant mTORC1 activity, as manifest by aberrant LARP1, SRPK2, and/or CDK12 phosphorylation level(s), and/or to adjust a drug dosage, for example, to the minimal dosage necessary to achieve a target mTORC1 activity level, or to choose a suitable drug modulating mTORC1 activity from a plurality of drugs, for example, the drug that exhibits the highest efficacy at a given dose.

[0079] Another example of an mTORC1 target protein identified herein is MIB1, an E3 ubiquitin-protein ligase that has been reported to ubiquinate Notch, which leads to the degradation of Notch. Accordingly, some aspects of this disclosure provide that mTORC1 activity is linked to Notch signaling via phosphorylation of MIB1. Yet another example of an mTORC1 target protein identified herein is IBTK (Isoform 2 of Inhibitor of Bruton tyrosine kinase), which is a protein tyrosine kinase implicated in the primary immunodeficiency disease X-linked agammaglobulinemia (Bruton agammaglobulinemia). IBTK is activated upon binding to PIP3 generated as a result of PI3K activation. Without wishing to be bound by any particular theory, phosphorylation of IBTK affects IBTK's ability to inhibit PI3K kinase activity. Accordingly, some embodiments of this invention are based on the recognition that there is a link between the mTORC1 signaling system and the regulation of tyrosine phosphorylation.

[0080] Accordingly, some embodiments provide MIB1 and/or IBTK phosphorylation as a biomarker for mTORC1 activity in a cell, tissue, or sample of interest. Methods of using MIB1 and/or IBTK expression or phosphorylation assays to monitor mTORC1 activity in a cell, tissue, or sample of interest are also provided. For example, some embodiments provide a method of monitoring the efficacy of a drug on mTORC1 activity in a cell, tissue, or sample, by measuring MIB1 and/or IBTK expression or phosphorylation levels. In some embodiments, such assessments are used to monitor or diagnose a disease associated with aberrant mTORC1 activity, as manifested by aberrant MIB1 and/or IBTK phosphorylation level(s), and/or to adjust a drug dosage, for example, to the minimal dosage necessary to achieve a target mTORC1 activity level, or to choose a suitable drug modulating mTORC1 activity from a plurality of drugs, for example, the drug that exhibits the highest efficacy at a given dose.

[0081] Representative protein sequences of Grb10, FOXK1, ZEB2, NDRG3, LARP1, SRPK2, CDK12, MIB1, IBTK, and other proteins identified herein to be mTORC1 substrates, can be found under the respective database entries provided in the tables and the database provided herein, and, for example, in the NCBI database under accession numbers NP_{—}001171100.1 (growth factor receptor-bound protein 10 (Grb10) isoform 2, Mus musculus, SEQ ID NO: 1720), NP_{—}034475.2 (growth factor receptor-bound protein 10 (Grb10) isoform 1, Mus musculus, SEQ ID NO: 1721), NP_{—}001001550.1 (growth factor receptor-bound protein 10 (Grb10) isoform c, SEQ ID NO: 7), NP_{—}005302.3 (Grb10 isoform a, SEQ ID NO: 8) and NP_{—}001001549.1 (Grb10 isoform b, SEQ ID NO: 9); NP_{—}001032242.1 (FOXK1, SEQ ID NO: 10); NP_{—}001165124.1 and NP_{—}055610.1 (ZEB2, SEQ ID NO: 11 and SEQ ID NO: 12, respectively); NP_{—}071922.2 and NP_{—}114402.1 (NDRG3, SEQ ID NO: 13 and SEQ ID NO: 14, respectively); NP_{—}056130.2 (LARP1, SEQ ID NO: 15); NP_{—}872633.1 and NP_{—}872634.1 (SRPK2, SEQ ID NO: 16 and SEQ ID NO: 17, respectively); NP_{—}055898.1 and NP_{—}057591.2 (CDK12, SEQ ID NO: 18 and SEQ ID NO: 19, respectively); NP_{—}065825.1 (MIB1, SEQ ID NO: 20); and NP_{—}056340.2 (IBTK, SEQ ID NO: 21). These database entries are incorporated herein by reference for disclosure of representative sequences of the respective proteins.

Feedback Circuitry Involving mTOR Targets

[0082] Some aspects of this invention relate to the surprising discovery that some mTOR target proteins are involved in feedback loops of mTOR signaling, for example, by inhibiting upstream modulators of mTOR signaling, such as PI3K, Akt, and MAPK, after being phosphorylated as a result of mTOR kinase activity. Some aspects of this invention relate to the surprising discovery that relief of feedback inhibition of cellular pro-survival, pro-proliferation signaling by mTOR downstream targets, for example, by Grb10, can contribute to rapamycin resistance or even clinically detrimental outcome in the treatment of neoplastic disease (e.g., cancer) with mTOR inhibitors. Some aspects of this invention relate to the identification, for the first time, of Grb10 as a target of mTOR kinase activity. Grb10, growth factor receptor-bound protein 10, is a protein well known to those of skill in the art. Representative protein sequences of Grb10 can be found under the respective database entries provided in the tables and the database provided herein, and, for example, in the NCBI database under accession numbers NP_{—}001001550.1 (growth factor receptor-bound protein 10 isoform c), NP_{—}005302.3 (isoform a) and NP_{—}001001549.1 (isoform b). These database entries are incorporated by reference for disclosure of representative Grb10 sequences.

### Feedback Inhibition of PI3K by Grb10

[0083] Some aspects of this invention relate to the surprising discovery that Grb10 is not only a target of mTOR kinase activity, but also a mediator of mTOR feedback inhibition and, thus, a tumor suppressor gene. As described in more detail elsewhere herein, mTOR-mediated phosphorylation of Grb10 results in stabilization and/or prevention of degradation of Grb10. Grb10, in turn, inhibits PI3K kinase activity. PI3K kinase activity targets mTOR and activates mTOR signaling. Accordingly, as provided by some aspects of this invention, treatment of a cancer exhibiting an elevated level of Grb10 phosphorylation can lead to relief of the Grb10-mediated feedback inhibition of PI3K. PI3K signaling, however, promotes proliferation and survival, and aberrant PI3K activity is known to contribute to carcinogenesis. The discovery that some mTOR targets identified herein, for example, Grb10, mediate a feedback inhibition of pro-survival and pro-proliferation signaling (e.g. PI3K, Akt, and MAPK signaling) in cancer cells, could explain why some types of cancer exhibiting elevated levels of mTOR activity do not respond favorably to treatment with an mTORC1 inhibitor (e.g., rapamycin) alone. The mTORC1 inhibitor may cause relief of the feedback inhibition which may, in turn result in sustained survival and proliferation, and even an increase or acceleration in disease progression or recurrence, as observed in some clinical trials of cancer treatment with mTOR inhibitors.

[0084] Also provided herein are methods of treating a cancer determined to exhibit an elevated level of Grb10 phosphorylation. In some embodiments, the method comprises administering to the subject an mTOR inhibitor and, additionally, an agent that stabilizes Grb10 or that inhibits the degradation of Grb10. In some embodiments, the method comprises effecting an inhibition of Grb10 degradation by administering a compound that inhibits Grb10 degradation. In some embodiments, the compound that inhibits Grb10 degradation is a ubiquitin ligase inhibitor, for example, a ubiquitin E3 ligase inhibitor. In some embodiments, the method comprises administering to the subject an mTOR inhibitor and, additionally, a PI3K inhibitor. PI3K inhibitors are known to those of skill in the art and described in more detail elsewhere herein.

### Diagnostic Methods

### Classification of Cancer Cells Based on Grb10 Phosphorylation

[0085] Some aspects of this invention provide methods for the classification of a neoplastic disease, for example, a cancer, based on the phosphorylation status of Grb10. In some embodiments, a method is provided that includes obtaining a neoplastic cell from a subject diagnosed to have a cancer, determining the level of Grb10 phosphorylation in the cell, and comparing the level of Grb10 phosphorylation to a reference level. In some embodiments, if the level of Grb10 phosphorylation in the cell is higher than the reference level, then the cell is determined to exhibit an elevated level of mTOR kinase activity. In some embodiments, the cell is determined to exhibit an elevated level of mTORC1 kinase activity based on an elevated level of Grb10 phosphorylation.

[0086] Methods of determining a level of protein phosphorylation, for example, of Grb10 phosphorylation, are well known to those of skill in the art. Exemplary methods as well as materials useful for such methods are described, for example, in Marjo de Graauw (Editor), Phospho-Proteomics: Methods and Protocols (Methods in Molecular Biology), Humana Press; 1 edition (2009), ISBN-10: 1603278338. Phosphosensitive binding agents, for example, phosphosensitive antibodies, are provided herein, are commercially available, or can be obtained by those of skill in the art with no more than routine experimentation.

[0087] Such methods include, for example, detection of phosphorylated protein with a phosphosensitive antibody and comparison of the amount of phosphorylated protein detected to the total amount of the protein in a sample. Other methods for quantitative or semi-quantitative detection of phosphorylated protein will be apparent to those of skill in the art and the invention is not limited in this respect.

[0088] In some embodiments, a method is provided that includes selecting a method of treatment of a neoplastic disease, for example, a cancer based on a cell from a subject having the disease exhibiting an elevated level of Grb10 phosphorylation. In some embodiments, an elevated level of Grb10 phosphorylation is indicative of an elevated level of rapamycin-sensitive mTORC1 kinase activity in the cell. In some embodiments, a method of treatment is chosen based on the cell exhibiting an elevated level of Grb10 phosphorylation that includes administration of an mTORC1 inhibitor, for example, a rapamycin or a rapamycin analog.

Classification of Cancer Cells Known to Exhibit Elevated Levels of mTOR Activity

[0089] Some aspects of this invention relate to the discovery that the mTOR target Grb10 is an inhibitor of the mTOR upstream regulators, PI3K, Akt, and MAPK, and, thus, can be characterized as a tumor suppressor gene and an mTOR feedback inhibitor. Some aspects of this invention provide a method for selecting a treatment of a cancer known to exhibit an elevated mTOR kinase activity based on the expression level of the mTORC1 target Grb10. In some embodiments, the method comprises obtaining a cancer cell from a subject diagnosed to have a cancer exhibiting an elevated level of mTOR activity, determining the level of Grb10 expression in the cell, and comparing the level of Grb10 expression to a reference level. In some embodiments, if the level of Grb10 expression in the cancer cell is higher than the reference level, then the cell is determined to exhibit a high likelihood of expressing an elevated level of PI3K, Akt, and/or MAPK activity upon being contacted with an mTORC1 inhibitor. In some embodiments, elevated expression of Grb10 supports the conclusion that upon treatment of the cell or a population of cells of the same type, mTORC1-dependent phosphorylation of Grb10 will be decreased or abolished, resulting in rapid ubiquitination and degradation of Grb10 protein, and, subsequently, in a relief of the Grb10-mediated feedback inhibition of PI3K, as described herein. This relief of feedback inhibition may, in some embodiments, result in elevated PI3K signaling. In some embodiments, elevated PI3K in a cancer cell is an undesirable response to treatment of a subject because it can lead to increased cell proliferation and/or survival, thus offsetting or even outweighing the beneficial effect of the administered mTORC1 inhibitor.

[0090] Measuring the expression level of an mTOR target protein can be achieved by using methods well known to those of skill in the art, including, but not limited to, protein expression assays, for example, immunostaining methods (e.g., western blot, protein microarray, immunohistochemistry, phosphoproteomic assays using phosphosensitive binding agents), ELISA, transcript expression assays, for example, RT-PCR, massive parallel sequencing assays, microarray assays, northern blot, or in situ hybridization. Other suitable methods will be apparent to those of skill in the art and the invention is not limited in this respect. See, for example, Sambrook et al., Molecular Cloning, second edition, Cold Spring Harbor Laboratory, Plainview, N.Y.; (1989); Ausubel et al., Current Protocols in Molecular Biology, Current Protocols (1989), and DNA Cloning: A Practical Approach, Volumes I and II (ed. D. N. Glover) IREL Press, Oxford, (1985); and Current Protocols in Molecular Biology, Wiley Publishing, accessible at www.currentprotocols.com; each of which is incorporated herein by reference.

[0091] In some embodiments, after a cancer cell is classified, a method of treatment of the subject from which the cell was obtained is selected based on the cancer cell exhibiting a high likelihood of expressing an elevated level of PI3K, Akt, and/or MAPK activity upon being contacted with an mTORC1 inhibitor. In some embodiments, the method of treatment comprises administering an effective amount of an mTOR kinase inhibitor and, additionally, an effective amount of an IGF1R, EGFR, PI3K, Akt, MEK, or RSK inhibitor, or a combination thereof. In some embodiments, the method of treatment comprises administering an effective amount of an mTOR kinase inhibitor and, additionally, of a compound stabilizing Grb10 to the subject. In some embodiments, the mTOR kinase inhibitor is an mTORC1 inhibitor, for example, rapamycin or a rapamycin analog. In some embodiments, the selected method of treatment is communicated to the subject, to a physician or other health care professional treating the subject. In some embodiments, the selected method of treatment is carried out.

Determining and Classifying mTOR Activity in a Cell Based on Phosphoproteomics

[0092] Some aspects of this invention provide methods for determining the level of mTOR activity in a cell based on analysis of the phosphorylation state of one or more mTOR targeted phosphorylation sites as provided herein. Some aspects of this invention provide methods to determine a class of mTOR signaling, for example, rapamycin-sensitive mTORC1 signaling, rapamycin-insensitive mTORC1 or mTORC2 signaling, or rapamycin-sensitive and/or rapamycin-insensitive mTOR signaling, in a cell based on an analysis of the phosphorylation state of a phosphorylation site as provided herein.

[0093] Methods useful for the determination of the phosphorylation level of a phosphorylation site in a cell are known to those of skill in the art. In some embodiments, such methods comprise obtaining a proteinaceous extract from the cell under conditions that allow for protein phosphorylation to be preserved with high fidelity. In some embodiments, such methods comprise contacting the cell extract with a phosphosensitive binding agent or with a plurality of phosphosensitive binding agents, for example, phosphosensitive antibodies or antibody fragments.

[0094] The invention provides phosphosensitive antibodies and antibody fragments to the phosphorylation sites described in the tables and the database. For example, phosphosensitive mTORC1 downstream effector antibodies, including, but not limited to, anti-phospho-NDRG3 (Ser331), anti-phospho-S501/503-Grb10, Anti-CDC2-related Kinase, Arg/Ser-Rich (Ser437), In some embodiments, antibodies provided herein are developed in rabbits. Other phosphosensitive antibodies are described elsewhere herein.

[0095] Phosphosensitive antibodies are useful in some embodiments to determine the phosphorylation level of one or more phosphorylation sites disclosed herein. One non-limiting example of such an embodiment is a phosphosensitive protein microarray assay. In some embodiments, the cell extract is contacted with a single phosphosensitive binding agent. In some embodiments, the cell extract is contacted with a plurality of binding agents in parallel. In some such embodiments, the cell is contacted with a microarray comprising a plurality of phosphosensitive binding antibodies or antibody fragments immobilized on a solid surface, for example, a glass surface. Phosphoproteomic assays, arrays, binding agents, and methods for sample preparation and analysis are well known in the art, and exemplary methods are described, for example, in Marjo de Graauw (Editor), Phospho-Proteomics: Methods and Protocols (Methods in Molecular Biology), Humana Press; 1 edition (2009), ISBN-10: 1603278338. The foregoing reference is incorporated herein by reference in its entirety for disclosure of methods and materials useful for the determination of the phosphorylation state of a phosphorylation site on a protein in a cell, tissue, or biological sample.

[0096] In some embodiments, the method comprises determining the level of phosphorylation of a phosphorylation site of a protein disclosed in Tables 1 or 2, and comparing the level of phosphorylation to a reference level. If the level of phosphorylation in the cell is higher than the reference level, then the cell is determined to exhibit an elevated level of mTOR kinase activity. If the level of phosphorylation in the cell is equal or lower than the reference level, then the cell is determined to not exhibit an elevated level of mTOR kinase activity. Methods of determining a level of phosphorylation are provided herein, and additional suitable methods will be apparent to those of skill in the art. The invention is not limited in this respect.

[0097] Suitable reference levels and methods of determining a reference level will be apparent to those of skill in the art. For example, if the cell is a neoplastic cell or cancer cell obtained from a subject, for example form a biopsy of a solid tumor in the subject, a suitable reference level may be obtained, in some embodiments, from a cell obtained from healthy or non-malignant tissue adjacent to the solid tumor, or a healthy cell of the same tissue of origin as the tumor cells from the same subject or from a different subject. If the cell is obtained from a healthy subject, a suitable reference level may be obtained from a cell of the same cell type obtained from another healthy subject. In some embodiments, a suitable reference level may be an average level or a range of levels observed or expected in cells obtained from healthy subjects that are of the same cell type of the same tissue of origin as the cell in question. In some embodiments, a reference level is a historical level, based on experience or prior experiments, or a level published or otherwise known in the art. Other suitable reference levels are described elsewhere herein and additional reference levels and methods to obtain such levels will be apparent to those of skill in the art.

[0098] In some embodiments, a plurality of phosphorylation sites are assayed including a Grb10 phosphorylation site, a pNDRG3 phosphorylation site, a CDK12 phosphorylation site, a FOXK1 phosphorylation site, a ZEB2 phosphorylation site, a LARP I phosphorylation site, an MIB1 phosphorylation site, an IBTK phosphorylation site, and/or a SRPK2 phosphorylation site. In some embodiments, a group of phosphorylation sites of proteins involved in a specific biological pathway are assayed, for example, of proteins known to those of skill in the art to be involved in a biological pathway disclosed in Table 10. In some embodiments, the plurality of phosphorylation sites includes mTOR target sites that were previously known. In some embodiments, the plurality of phosphorylation sites comprises at least 2, at least 3, at least 4, at least 5, at least 6, at least 7, at least 8, at least 9, at least 10, at least 11, at least 12, at least 13, at least 14, at least 15, at least 16, at least 17, at least 18, at least 19, at least 20, at least 25, at least 30, at least 40, at least 50, at least 60, at least 70, at least 80, at least 90, or at least 100 phosphorylation sites disclosed in Table 1. In some embodiments, the plurality of phosphorylation sites comprises at least 2, at least 3, at least 4, at least 5, at least 6, at least 7, at least 8, at least 9, at least 10, at least 11, at least 12, at least 13, at least 14, at least 15, at least 16, at least 17, at least 18, at least 19, at least 20, at least 25, at least 30, at least 40, at least 50, at least 60, at least 70, at least 80, at least 90, or at least 100 phosphorylation sites disclosed in Table 2. In some embodiments, the plurality of phosphorylation sites comprises at least 2, at least 3, at least 4, at least 5, at least 6, at least 7, at least 8, at least 9, at least 10, at least 11, at least 12, at least 13, at least 14, at least 15, at least 16, at least 17, at least 18, at least 19, at least 20, at least 25, at least 30, at least 40, at least 50, at least 60, at least 70, at least 80, at least 90, or at least 100 phosphorylation sites disclosed in Table 3 or in replicate described therein. In some embodiments, the plurality of phosphorylation sites comprises at least 2, at least 3, at least 4, at least 5, at least 6, at least 7, at least 8, at least 9, at least 10, at least 11, at least 12, at least 13, at least 14, at least 15, at least 16, at least 17, at least 18, at least 19, at least 20, at least 25, at least 30, at least 40, at least 50, at least 60, at least 70, at least 80, at least 90, or at least 100 phosphorylation sites disclosed in Table 7 or in replicate described therein. In some embodiments, the plurality of phosphorylation sites comprises at least 2, at least 3, at least 4, at least 5, at least 6, at least 7, at least 8, at least 9, at least 10, at least 11, at least 12, at least 13, at least 14, at least 15, at least 16, at least 17, at least 18, at least 19, at least 20, at least 25, at least 30, at least 40, at least 50, at least 60, at least 70, at least 80, at least 90, or at least 100 phosphorylation sites disclosed in Table 8. In some embodiments, the plurality of phosphorylation sites comprises at least 2, at least 3, at least 4, at least 5, at least 6, at least 7, at least 8, at least 9, at least 10, at least 11, at least 12, at least 13, at least 14, at least 15, at least 16, at least 17, at least 18, at least 19, at least 20, at least 25, at least 30, at least 40, at least 50, at least 60, at least 70, at least 80, at least 90, or at least 100 phosphorylation sites disclosed in Table 11, or in any Rapa or Ku replicate therein

[0099] In some embodiments, if a phosphorylation site determined to exhibit a higher level of phosphorylation in a cell in question, for example, a cancer cell obtained from a subject, as compared to a reference level is a class I phosphorylation site, then the cell is determined to exhibit an elevated level of rapamycin-sensitive mTORC1 activity. In some embodiments, if a phosphorylation site determined to exhibit a higher level of phosphorylation in the cell as compared to the reference level is a class II phosphorylation site, then the cell is determined to exhibit an elevated level of rapamycin-insensitive mTORC1 and/or mTORC2 activity. In some embodiments, if a phosphorylation site determined to exhibit a higher level of phosphorylation in the cell as compared to the reference level is a class III phosphorylation site, then the cell is determined to exhibit an elevated level of rapamycin-sensitive mTOR activity, or an elevated level of rapamycin-insensitive mTOR activity, or both. In some embodiments, if a cell is determined to exhibit a higher level of phosphorylation at phosphorylation sites of more than one class, then the cell is determined to exhibit a combination of elevated levels of mTOR signaling of the respective type.

[0100] In some embodiments, a method is provided comprising selecting a method of treatment based on the level of phosphorylation of the phosphorylation site(s) assayed. In some embodiments, if the cell is determined to exhibit an elevated level of mTOR kinase activity, then a method of treatment is selected that comprises administering an effective amount of an mTOR kinase inhibitor to the subject. In some embodiments, if the cell is determined to not exhibit an elevated level of mTOR kinase activity, then a method of treatment is selected that does not include administering an mTOR kinase inhibitor. In some embodiments, a method is provided that comprises selecting a method of treatment based on the classification of mTOR target sites that are determined to exhibit an elevated level of phosphorylation in the cell. For example, in some embodiments, if the cell is determined to exhibit an elevated level of rapamycin-sensitive mTORC1 activity, then a method of treatment is selected that comprises administering an effective amount of an inhibitor of rapamycin-sensitive mTORC1 kinase activity to the subject. In some embodiments, if the cell is determined to exhibit an elevated level of rapamycin-insensitive mTORC1 and/or mTORC2 activity, then a method of treatment is selected that comprises administering an effective amount of an inhibitor of rapamycin-insensitive mTORC1 kinase activity to the subject. In some embodiments, if the cell is determined to exhibit an elevated level of rapamycin-sensitive mTOR kinase activity, or an elevated level of rapamycin-insensitive mTOR kinase activity, or both, then a method of treatment is selected that comprises administering an effective amount of an inhibitor of rapamycin-sensitive and rapamycin-insensitive mTOR kinase activity or a combination of an inhibitor of rapamycin-sensitive mTOR kinase activity and an inhibitor of rapamycin-insensitive mTOR kinase activity to the subject.

Classification of a Cancer Based on Grb10 and/or PTEN Expression Levels

[0101] Some aspects of this invention relate to the surprising discovery that mutations leading to loss of function of the tumor suppressor Grb10 and mutations leading to loss of function of the tumor suppressor PTEN, are mutually exclusive. Loss of function of either tumor suppressor leads to elevated PI3K activity, which is thought to significantly contribute to carcinogenesis in certain types of cancer. In some embodiments, a method is provided that allows for the classification of a cancer based on Grb10 or PTEN expression levels. In some embodiments, the method comprises determining the level of expression of Grb10 in a cancer cell. In some embodiments, the method comprises determining the level of expression of PTEN in a cancer cell. In some embodiments, the method comprises determining the level of expression of Grb10 and PTEN in a cancer cell.

[0102] Expression levels of Grb10 and PTEN can be determined by various methods known to those of skill in the art including, for example methods for determining a level of protein, methods for determining a level of mRNA. Since phosphorylation affects protein stability, for example, stability of Grb10, methods for determining a level of protein phosphorylation may also be useful in assessing protein expression levels. Some such methods for expression analysis are provided herein, and additional methods will be apparent to those of skill in the art. The invention is not limited in this respect.

[0103] In some embodiments, the level of expression determined for Grb10 or PTEN is compared to a reference level, for example, to a level observed or expected in a healthy cell of the same cell type or of the same tissue of origin. In some embodiments, if the level of expression of Grb10 or of PTEN in the cell is lower than the reference level, then the cell is likely to exhibit an elevated level of PI3K activity. In some embodiments, if the cell is a neoplastic cell in a subject, a method of treatment with a combination of an mTOR inhibitor and a PI3K inhibitor or with a dual mTOR/PI3K inhibitor is indicated.

### Phosphoproteomics Binding Agents and Arrays

[0104] Phosphosensitive binding agents that specifically bind mTOR targets are also provided by the present invention. For example, some aspects of this invention provide antibodies and antibody fragments to each of the mTOR-targeted phosphorylation site disclosed in any of the Tables provided herein, for example, in any of Tables 1, 2, 3, 7, 8, or 11, and each such antibody is within the scope of the present invention. For example, some aspects of this invention provide aptamers and/or adnectins that specifically bind mTOR-targeted phosphorylation sites disclosed in Table 1, 2, 3, 7, 8, or 11, and each such aptamer or adnectin is within the scope of the present invention. In some embodiments, a kit is provided that comprises such phosphosensitive binding agents. A kit may also include a buffer, a container, control samples, or instructions.

[0105] Some embodiments provide a phosphoproteomics array that includes a plurality of phosphosensitive binding agents, for example, antibodies or antibody fragments, aptamers or adnectins, each of which specifically bind to a phosphorylation site disclosed in Table 1, 2, 3, 7, 8, or 11. In some embodiments the phosphosensitive binding agents are immobilized on a solid substrate, for example, on the surface of a glass slide, a bead, or a microtiter plate. In some embodiments, the plurality of phosphosensitive binding agents comprises binding agents that specifically bind to at least 2, at least 3, at least 4, at least 5, at least 6, at least 7, at least 8, at least 9, at least 10, at least 15, at least 20, at least 25, at least 30, at least 40, at least 50, at least 60, at least 70, at least 80, at least 90, or at least 100 phosphorylation sites disclosed in Table 1. In some embodiments, the plurality of phosphosensitive binding agents comprises binding agents that specifically bind to at least 2, at least 3, at least 4, at least 5, at least 6, at least 7, at least 8, at least 9, at least 10, at least 15, at least 20, at least 25, at least 30, at least 40, at least 50, at least 60, at least 70, at least 80, at least 90, or at least 100 phosphorylation sites disclosed in Table 2. In some embodiments, the plurality of phosphosensitive binding agents comprises binding agents that specifically bind to at least 2, at least 3, at least 4, at least 5, at least 6, at least 7, at least 8, at least 9, at least 10, at least 15, at least 20, at least 25, at least 30, at least 40, at least 50, at least 60, at least 70, at least 80, at least 90, or at least 100 phosphorylation sites disclosed in Table 3. In some embodiments, the plurality of phosphosensitive binding agents comprises binding agents that specifically bind to at least 2, at least 3, at least 4, at least 5, at least 6, at least 7, at least 8, at least 9, at least 10, at least 15, at least 20, at least 25, at least 30, at least 40, at least 50, at least 60, at least 70, at least 80, at least 90, or at least 100 phosphorylation sites disclosed in Table 7. In some embodiments, the plurality of phosphosensitive binding agents comprises binding agents that specifically bind to at least 2, at least 3, at least 4, at least 5, at least 6, at least 7, at least 8, at least 9, at least 10, at least 15, at least 20, at least 25, at least 30, at least 40, at least 50, at least 60, at least 70, at least 80, at least 90, or at least 100 phosphorylation sites disclosed in Table 8. In some embodiments, the plurality of phosphosensitive binding agents comprises binding agents that specifically bind to at least 2, at least 3, at least 4, at least 5, at least 6, at least 7, at least 8, at least 9, at least 10, at least 15, at least 20, at least 25, at least 30, at least 40, at least 50, at least 60, at least 70, at least 80, at least 90, or at least 100 phosphorylation sites disclosed in Table 11.

[0106] In some embodiments, an anti-phospho-S501/503-Grb10, anti-mTOR, anti-phospho-mTOR(S2481), anti-Grb10 (human), anti-phospho-Akt (Ser473), anti-Akt, anti-S6K, anti-phospho-S6K (T389), anti-IRS2, anti-PARP, anti-caspase 3, anti-4EBP, anti-4EBP (Ser37/46), anti-phospho-ribosomal protein S6 (Ser235/236), anti-ribosomal protein S6, anti-phospho-ERK1/2, anti-phospho-IRS (Y612), anti-p85 and anti-p110 of PI3K, and/or an anti ERK1/2 antibody or antibody fragment is provided. In some embodiments, phosphosensitive antibodies or antibody fragments are provided for mTOR upstream regulators, including, but not limited to anti-phospho-Akt (Ser473), anti-phospho-ERK1/2, anti-phospho-IRS (Y612), anti-p85, and anti-p110 of PI3K. In some embodiments, phosphosensitive antibodies or antibody fragments are provided for mTOR downstream effectors including, but not limited to anti-phospho-mTOR(S2481), anti-phospho-Akt (Ser473), anti-phospho-S6K (T389), anti-4EBP (Ser37/46), and anti-phospho-ribosomal protein S6 (Ser235/236).

[0107] In some embodiments, antibodies against mTORC1 downstream effectors identified for the first time herein are provided, including, anti-phospho-NDRG3 (Ser331), anti-phospho-S5011503-Grb10, and anti-CDC2-related kinase, Arg/Ser-Rich (Ser437).

[0108] Phosphosensitive binding agents, their generation and purification, and their use in assays, arrays, and methods for phosphoproteomics analyses of biological samples are well known in the art, and exemplary methods are described, for example, in Marjo de Graauw (Editor), Phospho-Proteomics: Methods and Protocols (Methods in Molecular Biology), Humana Press; 1 edition (2009), ISBN-10: 1603278338, incorporated herein by reference in its entirety. The foregoing reference is incorporated herein by reference in its entirety for disclosure of phosphosensitive binding agents, their generation and purification, and their use in assays, arrays, and methods for phosphoproteomics analyses of biological samples.

[0109] Methods of using a microarray comprising a plurality of phosphosensitive binding agents that specifically bind mTOR targets are also provided. In some embodiments, methods of using a phosphoproteomics array to determine mTOR activity in a cell, for example, in a cancer cell, are provided. In some embodiments, the method comprises contacting a proteinaceous sample derived from the cell with the phosphoproteomics array under conditions suitable for a protein expressed in the cell to bind to an antibody or antibody fragment of the array. Such conditions are well known to those of skill in the art and exemplary protocols for phosphoprotein microarrays are described in Marjo de Graauw (Editor), Phospho-Proteomics: Methods and Protocols (Methods in Molecular Biology), Humana Press; 1 edition (2009), ISBN-10: 1603278338, incorporated herein by reference for the disclosure of such methods and conditions. In some embodiments, the method further comprises determining a level of phosphorylated protein bound to a binding agent, for example, an antibody or antibody fragment of the array. In some embodiments, this step includes quantification, absolute or relative to a reference level, of the amount of protein bound to a specific binding agent. In some embodiments, the method includes comparing the level of phosphorylated protein bound to an antibody or antibody fragment of the array to a reference level, wherein if the level phosphorylated protein in the sample derived from the cell is higher than the reference level, then the cell is determined to exhibit an elevated level of mTOR kinase activity.

[0110] In some embodiments, methods are provided that include generating a phosphoproteomic profile of the cell. In some embodiments, the profile includes phosphorylation levels of a plurality of proteins, for example, mTOR targets expressed in the cell. In some embodiments, the method further includes comparing the phosphoproteomic profile of the cell with a phosphoproteomic profile of a control cell. In some embodiments, if the phosphoproteomic profile of the cell is similar to that of the control cell, then the cell is determined to exhibit a level of mTOR kinase activity similar to that of the control cell. Methods for comparing phosphoprotein profiles are well known in the art and include, for example, hierarchical clustering methods, supervised and unsupervised learning methods, classification methods, for example class predictor building methods based on phosphoproteomics profiles from cells of known character, and calculation of correlation parameters, such as distance analysis or correlation coefficient calculations. Useful similarity ranges are also known to those of skill in the art and the invention is not limited in this respect. For non-limiting examples of disclosures of such methods and algorithms, see Lim, Y. (2005) Mining the tumor phosphoproteome for cancer markers. Clin Cancer Res 11(9): 3163-3169; Kalume, D. et al. (2003) Tackling the phosphoproteome: tools and strategies Current Opinion in Chemical Biology 7: 64-69; Schmelzle, K. & White, F. (2006) Phosphoproteomic approaches to elucidate cellular signaling networks. Current Opinion in Chemical Biology 17: 406-414; Olsen J V et al. Global, in vivo, and site-specific phosphorylation dynamics in signaling networks. Cell. 2006 Nov. 3; 127(3):635-48; Mumby, M. & Brekken, D. (2005) Phosphoproteomics: new insights into cellular signaling. Genome Biology 6: 230.1-230.7; Zhang et al. J. Proteome Res. vol. 5 pp. 581-8 2006; Hoffert J D, et al. Quantitative phosphoproteomics of vasopressin-sensitive renal cells: regulation of aquaporin-2 phosphorylation at two sites. Proc Natl Acad Sci USA. 2006 May 2; 103(18):7159-64; Johnson, S & Hunter, T. (2004) Phosphoproteomics finds its timing. Nature Biotech 22(9): 1093-1094; and Marjo de Graauw (Editor), Phospho-Proteomics: Methods and Protocols (Methods in Molecular Biology), Humana Press; 1 edition (2009), ISBN-10: 1603278338; all incorporated herein by reference in their entirety

[0111] In some embodiments, the control cell is a healthy cell. In some embodiments, the control cell is a cell exhibiting normal mTOR kinase activity. In some embodiments, the control cell is a cancer cell. In some embodiments, the control cell is a rapamycin-sensitive cancer cell. In some embodiments, the control cell is a rapamycin insensitive cancer cell.

Identification of mTOR Kinase Inhibitors Based on mTOR Target Analysis

[0112] In some aspects, the invention provides methods of identifying an mTOR kinase inhibitors by analyzing the phosphorylation state of an mTOR target as provided herein after contacting a cell or test sample with a candidate agent. In some embodiments, mTOR phosphorylation efficiency directed towards a target disclosed in Table 1, 2, 3, 7, 8, or 11 is measured in the presence of a candidate agent. In some embodiments, the method includes contacting an mTOR kinase molecule with a polypeptide comprising a phosphorylation site disclosed in Table 1, 2, 3, 7, 8, or 11 under conditions suitable for the mTOR kinase to phosphorylate the phosphorylation site in the presence of a candidate agent. In some embodiments, the level of phosphorylation of the phosphorylation site is then determined and compared to a reference level. In some embodiments, if the level obtained in the presence of the candidate agent is lower than the reference level, then the candidate agent is identified as an mTOR kinase inhibitor.

[0113] In some embodiments, the phosphorylation site is a Grb10 phosphorylation site, a pNDRG3 phosphorylation site, a CDK12 phosphorylation site, a FOXK1 phosphorylation site, a ZEB2 phosphorylation site, a LARP1 phosphorylation site, an MIB1 phosphorylation site, an IBTK phosphorylation site, and/or a SRPK2 phosphorylation site. In some embodiments, the candidate agent is a polypeptide, an aptamer, an adnectin, or a small molecule. In some embodiments, the reference level is the level of phosphorylation of the phosphorylation site determined in the absence of the candidate agent. In some embodiments, the level determined in the presence of the candidate agent is lower than the reference level, if the level determined in the presence of the candidate agent is less than 75%, less than 50%, less than 40%, less than 30%, less than 25%, less than 20%, less than 10%, less than 5%, less than 2.5%, or less than 1% of the reference level.

[0114] In some embodiments, the contacting is performed in vitro. In some embodiments, the contacting is performed in vivo. In some embodiments, the reference level is a level observed or expected in the absence of the candidate agent. In some embodiments, the reference level is a level observed or expected in the absence of any candidate agent. In some embodiments, the reference level is a level observed or expected in the presence of a known agent. In some embodiments, the reference level is a level observed or expected in the presence of a control agent.

### Subjects and Cells

[0115] In some embodiments, the subject is an animal. In some embodiments, the subject is a domesticated animal. In some embodiments, the subject is a mammal. In some embodiments, the subject is a non-human mammal. In some embodiments, the subject is a non-human primate. In some embodiments, the subject is a mouse, rat, or rabbit. In some embodiments, the subject is a sheep, goat, cattle, pig, horse, dog, or cat. In some embodiments, the subject is a human.

[0116] In some embodiments, the subject is a healthy subject. In some embodiments, the subject is a subject having a hyperproliferative disease. In some embodiments, the subject is a subject having a neoplastic disease. In some embodiments, the subject is a subject having a cancer. In some embodiments, the subject is a subject having a cancer characterized and/or diagnosed to exhibit an elevated level of mTOR activity. In some embodiments, the subject is a subject who had a tumor removed.

[0117] In some embodiments, the cell is a healthy cell. In some embodiments, the cell is any cell. In some embodiments, the cell is a bacterial cell. In some embodiments, the cell is an animal cell. In some embodiments, the cell is a mammalian cell. In some embodiments, the cell is a human cell. In some embodiments, the cell is a cell of a cell line. In some embodiments, the cell is a transformed or immortalized cell. In some embodiments, the cell is a neoplastic cell. In some embodiments, the cell is a tumor cell. In some embodiments, the cell is a cancer cell. In some embodiments, the cell is obtained from a tumor in a subject, for example, by tumor biopsy. In some embodiments, the cell is a cell obtained from a tumor that has been removed from a subject.

[0118] In some embodiments, the cell is a cell known to exhibit an elevated level of mTOR activity. In some embodiments, the cell is a cell carrying a mutation in a gene involved in an mTOR signaling pathway. In some embodiments, the gene involved in an mTOR signaling pathway is a gene involved in IGF signaling, EGFR signaling, GF signaling, PI3K signaling, AKT signaling, MAPK signaling, Ras signaling, Raf signaling, or Rb signaling. In some embodiments, the gene is TSC1/2, a receptor tyrosine kinases (RTK), PI3K, PTEN, Akt, Ras, Raf, MEK, LKB, or NF2.

### Kinase Inhibitors

[0119] Kinase inhibitors useful for some aspects of this invention include, but are not limited to, mTOR inhibitors, PI3K inhibitors, Akt inhibitors, and MAPK inhibitors. Further, inhibitors useful for some methods provided herein include, for example, inhibitors of mTOR target degradation, for example, inhibitors of Grb10 degradation. In some embodiments, a kinase inhibitor, for example, an mTOR inhibitor, as provided herein, is an allosteric mTOR kinase inhibitor or a catalytic mTOR kinase inhibitor. In some embodiments, the allosteric mTOR kinase inhibitor is rapamycin or a rapamycin analog. In some embodiments, the catalytic mTOR kinase inhibitor is an ATP-competitive mTOR kinase inhibitor. Other allosteric and catalytic mTOR kinase inhibitors are well known to those of skill in the art, and the invention is not limited in this respect.

[0120] In some embodiments, an mTOR kinase inhibitor as provided herein is an mTORC1 inhibitor. In some embodiments, an mTOR kinase inhibitor as provided herein is an mTORC1/2 inhibitor. In some embodiments, an mTOR kinase inhibitor as provided herein is rapamycin or a rapamycin analog. In some embodiments, the rapamycin analog is Ridaforolimus, Sirolimus or Everolimus. In some embodiments, an mTOR kinase inhibitor as provided herein is PP242, PP30, AZD8055, OSI-027, WYE354, INK-128, XL388, torin1, rapamycin (sirolimus), FK506 (tacrolimus), CCI779 (temsirolimus), RAD001 (everolimus), AP23573 (deforolimus, ridaforolimus), S-trans,trans-farnesyl thiosalicylic acid (FTS), FKBP38, PX-866, Theophylline, Caffeine, LY303511, PI-103, 2-(morpholin-1-yl)pyrimido[2,1-aplpha]isoquinolin-4-one, or BEZ235 (NVP-BEZ235)

[0121] In some embodiments, an mTOR kinase inhibitor as provided herein is a dual PI3K/mTOR kinase inhibitor. In some embodiments, the dual PI3K/mTOR kinase inhibitor is NVP-BEZ235, BGT-226, XL-765, GSK2126458 or SF1126. Some of the mTOR kinase inhibitors listed immediately above are in various stages of clinical trials. Additional mTOR inhibitors will be apparent to the skilled artisan as they are well known in the art, and it should be appreciated that the invention is not limited in this respect.

[0122] In some embodiments, a PI3K inhibitor is provided that is useful in a therapeutic method provided by aspects of this invention. In some embodiments, a PI3K inhibitor as provided herein is ZSTK474, TGX221, GDC0941, or LY294002, XL147, PX147, BKM120, GSK 615, CAL101, PX-866, Quercetin, Tetrodotoxin citrate, Thioperamide maleate, IC87114, PI-103, BEZ235 (NVP-BEZ235), TGX-115, (−)-Deguelin, NU 7026, Myricetin, Tandutinib, SF1126, XL765, D-87503, D-106669, or GSK615. In some embodiments, a PI3K inhibitor provided herein is a dual PI3K/mTOR kinase inhibitor, for example, NVP-BEZ235, BGT-226, XL-765, GSK2126458 or SF1126. In some embodiments, an Akt inhibitor is provided that is useful in a therapeutic method provided by aspects of this invention. In some embodiments, the Akt inhibitor is perifosine, GSK690693, A443654 or MK2206.

[0123] In some embodiments, a compound is provided that inhibits the degradation of an mTOR target, for example, of Grb10, NDRG3, CDK12, FOXK1, ZEB2, LARP1, MIB1, IBTK, and/or SRPK2. In some embodiments, the compound that inhibits the degradation of an mTOR target is a ubiquitin ligase inhibitor. In some embodiments, the ubiquitin ligase inhibitor is an E3 ubiquitin ligase inhibitor.

### Compositions

[0124] In some embodiments, pharmaceutical compositions are provided that comprise an mTOR kinase inhibitor, a PI3K, Akt, or MAPK inhibitor, and/or an agent that inhibits the degradation of an mTOR target, for example, Grb10, NDRG3, CDK12, FOXK1, ZEB2, LARP1, MIB1, IBTK, and/or SRPK2. Pharmaceutical compositions provided herein preferably are sterile and contain an effective amount of one or more therapeutic agents as described herein for producing the desired response in a unit of weight or volume suitable for administration to a patient. If the desired response is amelioration of a hyperproliferative disease, neoplastic disease, or cancer, then the response can, for example, be measured by determining the proliferation of neoplastic or cancer cells in a subject after treatment by, for example, measuring tumor volume, evaluating regression, relapse, or disease symptoms, or by obtaining a cell sample and perform cell counting, flow cytometry, FACS, and other methods well known in the art to be suitable to determine cell proliferation.

[0125] In some embodiments, the pharmaceutical compositions as described herein may contain suitable buffering agents, for example, acetic acid in a salt form, citric acid in a salt form, boric acid in a salt form, and/or phosphoric acid in a salt form. The pharmaceutical compositions also may contain, optionally, suitable preservatives, such as ascorbic acid, benzalkonium chloride, benzyl alcohol, m-cresol, chlorobutanol, parabens, EDTA, EGTA, and/or thimerosal. The pharmaceutical compositions may conveniently be presented in unit dosage form and may be prepared by any of the methods well-known in the art of pharmacy.

[0126] In some embodiments, a therapeutic method or a method of formulating a kinase inhibitor into a medicament for therapeutic use may include the step of bringing the active agent, for example, a kinase inhibitor as described herein, into association with a carrier which constitutes one or more accessory ingredients. In general, compositions are prepared by uniformly and intimately bringing the active compound(s) into association with a liquid carrier, a finely divided solid carrier, or both, and then, if necessary, shaping the product.

[0127] In some therapeutic embodiments, a composition or pharmaceutic preparation provided herein is administered orally to a subject having a cancer. In some embodiments, compositions as described herein that are suitable for oral administration may be presented as discrete units, such as capsules, tablets, lozenges, each containing a predetermined amount of the active compound. Other examples of compositions include suspensions in aqueous liquids or non-aqueous liquids, such as a syrup, elixir, or an emulsion. Examples of compositions for parenteral administration include, without being limited to, sterile aqueous or non-aqueous solutions, suspensions, and emulsions. Examples of non-aqueous solvents are propylene glycol, polyethylene glycol, vegetable oils such as olive oil, and injectable organic esters such as ethyl oleate. Examples of aqueous carriers are water, alcoholic/aqueous solutions, emulsions or suspensions, for example, saline and buffered media. Examples of parenteral vehicles are sodium chloride solution, Ringer's dextrose, dextrose and sodium chloride, and lactated Ringer's or fixed oils. Examples for intravenous vehicles are fluid and nutrient replenishers, electrolyte replenishers (such as those based on Ringer's dextrose), and the like. Preservatives and other additives may also be present such as, for example, antimicrobials, anti-oxidants, chelating agents, and inert gases, and the like.

[0128] In some embodiments, a composition comprising a compound or a combination of compounds, useful in this invention, may further comprise an antioxidant to retard oxidation of one or more component. Additionally, the prevention of the action of microorganisms can be brought about by a preservative such as an antibacterial and antifungal agent, including but not limited to parabens (e.g., methylparabens, propylparabens), chlorobutanol, phenol, sorbic acid, thimerosal or combinations thereof.

[0129] The compounds useful in the invention, for example the mTOR, PI3K, Akt or MAPK inhibitors provided herein, may be derivatized in various ways. As used herein “derivatives” of the compounds (e.g., small molecule JAK2 and other kinase inhibitors) include salts (e.g., pharmaceutically acceptable salts), any complexes (e.g., inclusion complexes or clathrates with compounds such as cyclodextrins, or coordination complexes with metal ions such as Mn²+ and Zn²+), esters such as in vivo hydrolysable esters, free acids or bases, polymorphic forms of the compounds, solvates (e.g., hydrates), prodrugs or lipids, coupling partners and protecting groups. By “prodrugs” is meant for example any compound that is converted in vivo into a biologically active compound.

[0130] The term “pharmaceutically acceptable salt” in this respect refers to the relatively non-toxic, inorganic or organic acid addition salts of agents of the present invention. These salts can be prepared in situ in the administration vehicle or the dosage form manufacturing process, or by separately reacting a purified agent of the invention with a suitable organic or inorganic acid, and isolating the salt thus formed during subsequent purification. Representative salts include the bromide, chloride, sulfate, bisulfate, phosphate, phosphonate, nitrate, acetate, valerate, oleate, palmitate, stearate, laurate, benzoate, lactate, tosylate, citrate, maleate, fumarate, succinate, tartrate, napthylate, mesylate, glucoheptonate, lactobionate, laurylsulphonate salts, and the like. See, for example, Berge et al. (1977) J. Pharm. Sci. 66:1-19.

[0131] The pharmaceutically acceptable salts of the subject agents include the conventional nontoxic salts or quaternary ammonium salts of the compounds, e.g., from non-toxic organic or inorganic acids. For example, such conventional nontoxic salts include those derived from inorganic acids such as hydrochloride, hydrobromic, sulfuric, sulfamic, phosphoric, nitric, and the like; and the salts prepared from organic acids such as acetic, propionic, succinic, glycolic, stearic, lactic, malic, tartaric, citric, ascorbic, palmitic, maleic, hydroxymaleic, phenylacetic, glutamic, benzoic, salicyclic, sulfanilic, 2-acetoxybenzoic, fumaric, toluenesulfonic, methanesulfonic, ethane disulfonic, oxalic, isothionic, and the like.

[0132] As set out herein, certain compounds may contain a basic functional group, such as amino or alkylamino, and are, thus, capable of forming pharmaceutically acceptable salts with pharmaceutically acceptable acids. The term “pharmaceutically acceptable salts” in this respect refers to the relatively non-toxic, inorganic or organic acid addition salts of compounds of the present invention. These salts can be prepared in situ in the administration vehicle or the dosage form manufacturing process, or by separately reacting a purified compound of the invention in its free base form with a suitable organic or inorganic acid, and isolating the salt thus formed during subsequent purification. Representative salts include the hydrobromide, hydrochloride, sulfate, bisulfate, phosphate, phosphonate, nitrate, acetate, valerate, oleate, palmitate, stearate, laurate, benzoate, lactate, tosylate, citrate, maleate, fumarate, succinate, tartrate, napthylate, mesylate, glucoheptonate, lactobionate, and laurylsulphonate salts and the like. See, for example, Berge et al. (1977) J. Pharm. Sci. 66:1-19.

[0133] The pharmaceutically acceptable salts of the compounds useful in the present invention include the conventional nontoxic salts or quaternary ammonium salts of the compounds, e.g., from non-toxic organic or inorganic acids. For example, such conventional nontoxic salts include those derived from inorganic acids such as hydrochloride, hydrobromic, sulfuric, sulfamic, phosphoric, nitric, and the like; and the salts prepared from organic acids such as acetic, propionic, succinic, glycolic, stearic, lactic, malic, tartaric, citric, ascorbic, palmitic, maleic, hydroxymaleic, phenylacetic, glutamic, benzoic, salicyclic, sulfanilic, 2-acetoxybenzoic, fumaric, toluenesulfonic, methanesulfonic, ethane disulfonic, oxalic, isothionic, and the like.

[0134] In other cases, the compounds may contain one or more acidic functional groups and, thus, are capable of forming pharmaceutically acceptable salts with pharmaceutically acceptable bases. The term “pharmaceutically acceptable salts” in these instances refers to the relatively non-toxic, inorganic and organic base addition salts of compounds of the present invention. These salts can likewise be prepared in situ in the administration vehicle or the dosage form manufacturing process, or by separately reacting the purified compound in its free acid form with a suitable base, such as the hydroxide, carbonate or bicarbonate of a pharmaceutically acceptable metal cation, with ammonia, or with a pharmaceutically acceptable organic primary, secondary or tertiary amine. Representative alkali or alkaline earth salts include the lithium, sodium, potassium, calcium, magnesium, and aluminum salts and the like. Representative organic amines useful for the formation of base addition salts include ethylamine, diethylamine, ethylenediamine, ethanolamine, diethanolamine, piperazine, and the like. See, for example, Berge et al. (1977) J. Pharm. Sci. 66:1-19.

[0135] In embodiments where the composition is in a liquid form, a carrier can be a solvent or dispersion medium comprising but not limited to, water, ethanol, polyol (e.g., glycerol, propylene glycol, liquid polyethylene glycol, etc.), lipids (e.g., triglycerides, vegetable oils, liposomes), and combinations thereof. The proper fluidity can be maintained, for example, by the use of a coating, such as lecithin; by the maintenance of the required particle size by dispersion in carriers such as, for example liquid polyol or lipids; by the use of surfactants such as, for example, hydroxypropylcellulose; or combinations thereof such methods. In many cases, it will be advisable to include isotonic agents, such as, for example, sugars, sodium chloride, or combinations thereof.

### Therapeutic Methods

[0136] Some aspects of this invention provide therapeutic methods, for example, methods for the treatment of subjects having a hyperproliferative disease, a neoplastic disease, or a cancer. In some embodiments, a method of treatment is personalized to a specific subject by taking into account the phosphorylation level of at least one an mTOR target site in the subject. In some embodiments, therapeutic methods disclosed herein include administration of an mTOR inhibitor, for example, of an mTORC1 or an mTORC1/2 inhibitor. In some embodiments, therapeutic methods described herein include administration of an mTOR inhibitor and an additional kinase inhibitor, for example, a PI3K inhibitor, a MAPK inhibitor, MEKIERK inhibitor, or an AKT/PKB inhibitor. In some embodiments, therapeutic methods provided herein include administration of a dual mTOR/PI3K inhibitor, or of a combination of an mTOR inhibitor and a PI3K inhibitor.

[0137] In some therapeutic embodiments, a composition disclosed herein, for example, a composition comprising an mTOR inhibitor or a composition comprising an mTOR inhibitor and a PI3K inhibitor is administered to a subject having a cancer in an effective amount. An effective amount, in some embodiments, is an amount sufficient to elicit a desired clinical response in the subject. In some embodiments, the desired response is a slowing or inhibiting of the progression of a disorder, for example, of a malignant neoplastic disorder. In some embodiments, this involves slowing the progression of the disease temporarily, although, in more preferable embodiments, it involves halting the progression of the disease permanently.

[0138] In some embodiments, the desired response is a permanent reduction of cancer cell proliferation, for example, to a level comparable to a level found in healthy individuals. In some embodiments, a desired response is the induction of cell death in a cancer cell, in a population of cancer cells, or in all cancer cells in a subject. In some embodiments, the desired response is delaying or preventing the manifestation of clinical symptoms characteristic of the disease or condition.

[0139] The effect of administering an mTOR inhibitor, either alone or in combination with an additional compound, for example, a PI3K inhibitor, as provided herein, can be monitored by routine methods well known to those of skill in the related medical arts, for example, by methods involving assessment of cancer cell proliferation.

[0140] What constitutes an effective amount will depend on the particular condition being treated, the severity of the condition, the individual patient parameters including age, physical condition, size, and weight, the duration of the treatment, the nature of concurrent therapy (if any), the specific route of administration and like factors within the knowledge and expertise of the health care professional treating the subject. These factors are well known to those of ordinary skill in the art and can be addressed with no more than routine experimentation. It is generally preferred that a maximum dose of the individual components or combinations thereof be used, that is, the highest safe dose according to sound medical judgment. It will be understood by those of ordinary skill in the art, however, that a lower dose or tolerable dose may be used for medical reasons.

[0141] In general, an effective amount of a therapeutic agent, for example, an mTOR inhibitor or a combination of an mTOR inhibitor with a PI3K, Akt, or MAPK inhibitor, as provided herein, for the treatment of a cancer exhibiting an elevated level of mTOR kinase activity is a dose that achieves an alleviation of the specific neoplastic disease or disorder being treated, for example, by prevention, inhibition, amelioration, delay, or elimination of a symptom of such a disease or disorder.

[0142] Some embodiments provide a method of inducing cell death and/or inhibiting proliferation in a neoplastic cell exhibiting elevated mTOR kinase activity by contacting the cell with an mTOR kinase inhibitor or a combination of an mTOR kinase inhibitor and another kinase inhibitor, for example, a PI3K, Akt, or MAPK inhibitor, chosen based on the determination of the type of mTOR kinase signaling active in the cell. In some embodiments, the neoplastic cell is contacted in vivo by administering a composition disclosed herein to a subject carrying the cell. In some embodiments, the neoplastic cell is contacted ex vivo. In some embodiments, the cell is contacted in vitro.

[0143] In some embodiments, a neoplastic cell is contacted in vivo, ex vivo, or in vitro, with an effective amount of an mTOR inhibitor or a combination of an mTOR inhibitor and an additional kinase inhibitor, for example, a PI3K, Akt, or MAPK inhibitor, as provided herein. An effective amount, in some embodiments, is an amount sufficient to elicit a desired response in the contacted cell. In some embodiments involving contacting a neoplastic cell exhibiting elevated mTOR activity, for example, because of a mutation in an mTOR upstream pathway, the desired response is a slowing or inhibiting of the proliferation of the cell. In some embodiments, this decreases the proliferation rate and/or cell viability and/or life span, although, in more preferable embodiments, it involves the induction of cell death in the contacted cell or cells.

[0144] In some embodiments, the therapeutic methods provided herein further involve the administration of an additional antiproliferative agent to a cancer cell or to a subject carrying a cancer cell, for example, as part of a malignant tumor. Additional antiproliferative agents useful in the methods described herein are well known in the art and include, but are not limited to chemotherapeutic agents (e.g., cytostatic, and cytotoxic agents). Cytotoxic and cytostatic drugs are drugs that kill malignant cells, or inhibit their proliferation, respectively. Examples of cytotoxic and cytostatic drugs include, for example, alkylating agents, antimetabolites, antitumor antibiotics, vinca alkaloids, taxanes, topoisomerase-I compounds, anthrapyrazoles, and epidophylotoxins. In addition, angiogenesis inhibiting drugs, including, for example, compounds that block growth promoting receptors (e.g., PDGF-R and VEGF-R) such as sunitinib (Sutent®) may be used as additional antiproliferative agents. Non-limiting examples of additional antiproliferative agents include Cytoxan® (Cyclophosphamide), Methotrexate, 5-Fluorouracil (5-FU), Adriamycin® (Doxorubicin), Prednisone, Nolvadex® (Tamoxifen), Taxol® (Paclitaxel), Leucovorin, Oncovin® (Vincristine), Thioplex® (Thiotepa), Arimidex® (Anastrozole), Taxotere® (Docetaxel), Navelbine®, (Vinorelbine), Gemzar® (Gemcitabine), Ifex® (Ifosfamide), Pemetrexed, Topotecan, Melphalan (L-Pam®), Cisplatin (Cisplatinum®, Platinol®), Carboplatin (Paraplatin®), Carmustine (BCNU; BiCNU®), Methotrexate, Edatrexate, Mitomycin C (Mutamycin®), Mitoxantrone (Novantrone®), Vincristine (Oncovin®), Vinblastine (Velban®), Vinorelbine (Navelbine®), Fenretinide, Topotecan, Irinotecan, 9-amino-camptothecin (9-AC); Biantrazole, Losoxantrone, Etoposide, and Teniposide.

[0145] Administration schedules, formulations, dosages, and administration routes of antiproliferative agents and compositions are well known to those in of skill in the art. Exemplary administration routes, schedules, and dosages of commonly used chemotherapeutic drugs are described in Perry, The Chemotherapy Source Book, 4^{th} Edition, Lippinkott Williams & Wilkins, 2008, incorporated herein by reference. Such administration schedules may comprise the administration of a single antiproliferative drug or the administration of a combination of such drugs, for example, one of the following, commonly administered combinations: CMF (cyclophosphamide, methotrexate, and 5-fluorouracil); classic CMF (oral cyclophosphamide plus methotrexate and 5-fluorouracil); CAF or FAC (cyclophosphamide, Adriamycin® (doxorubicin), and 5-fluorouracil); AC (Adriamycin® and cyclophosphamide); ACT (Adriamycin® plus cyclophosphamide and tamoxifen); AC taxol (Adriamycin® plus cyclophosphamide and paclitaxel (Taxol®); FACT (5-fluorouracil plus Adriamycin®, cyclophosphamide, and tamoxifen); A-CMF or Adria/CMF (4 cycles of Adriamycin® followed by 8 cycles of CMF); CMFP (CMF plus prednisone); CMFVP (CMF plus vincristine and prednisone); CAFMV (CAF plus methotrexate and vincristine); CMFVATN (CMF plus vincristine, Adriamycin®, thiotepa, and tamoxifen); MF (methotrexate plus 5-fluorouracil and leucovorin). The administration of such combinations of antiproliferative drugs and agents in addition to the administration of an mTOR kinase inhibitor with or without an additional kinase inhibitor, for example, a PI3K, Akt, or MAPK inhibitor, is also envisioned to be embraced by some embodiments.

[0146] The therapeutic inhibitors and compositions can be administered in a single dose comprising an effective amount of the individual agents. Multiple doses of the compounds of the invention are also contemplated. When a plurality of inhibitors are used together, they may be administered individually or sequentially, either in a single medicament or in separate units to provide therapeutic doses of the individual compounds. Many mTOR inhibitors, PI3K inhibitors, Akt inhibitors and MAPK inhibitors described herein are in clinical studies or even in clinical use. Therapeutic doses of such compounds are, accordingly, well known in the field of medicine. Dosages of compounds in clinical use are described in references such as Remington's Pharmaceutical Sciences, 18th ed., 1990; as well as many other medical references relied upon by the medical profession as guidance for the treatment of proliferation disorders.

### Administration Routes and Methods

[0147] A variety of administration routes are available for the kinase inhibitors and other therapeutic agents described herein. The particular mode selected will depend, of course, upon the particular compound selected, the particular condition being treated and the dosage required for therapeutic efficacy. The methods of this invention may be practiced using any mode of administration that is medically acceptable, meaning any mode that produces effective levels of compounds without causing clinically unacceptable adverse effects. Examples of modes of administration are parenteral routes. The term “parenteral” includes subcutaneous, intravenous, intramuscular, intraperitoneal, and intrasternal injection, or infusion techniques. Other routes include, but are not limited to, oral, nasal, dermal, sublingual, and local.

[0148] The formulations of the invention are administered in pharmaceutically acceptable solutions, which may routinely contain pharmaceutically acceptable concentrations of salts, buffering agents, preservatives, compatible carriers, adjuvants, and optionally other therapeutic ingredients.

[0149] According to the methods provided by aspects of the invention, the compounds described herein may be administered in a pharmaceutical composition. In some embodiments, a pharmaceutical composition comprises a compound provided by aspects of the invention and a pharmaceutically acceptable carrier. As used herein, a pharmaceutically acceptable carrier refers to a non-toxic material that does not interfere with the effectiveness of the biological activity of the active ingredients.

[0150] Pharmaceutically acceptable carriers include diluents, fillers, salts, buffers, stabilizers, solubilizers, and other materials which are well known in the art. Such preparations may routinely contain salt, buffering agents, preservatives, compatible carriers, and optionally other therapeutic agents. When used in medicine, the salts should be pharmaceutically acceptable, but non-pharmaceutically acceptable salts may conveniently be used to prepare pharmaceutically acceptable salts thereof and are not excluded from the scope of the invention. Such pharmacologically and pharmaceutically acceptable salts include, but are not limited to, those prepared from the following acids: hydrochloric, hydrobromic, sulfuric, nitric, phosphoric, maleic, acetic, salicylic, citric, formic, malonic, succinic, and the like. Also, pharmaceutically acceptable salts can be prepared as alkaline metal or alkaline earth salts, such as sodium, potassium or calcium salts.

[0151] The compounds used in the invention may be formulated into preparations in solid, semi-solid, liquid or gaseous forms such as tablets, capsules, powders, granules, ointments, solutions, depositories, inhalants and injections, and usual ways for oral, parenteral or surgical administration. Some aspects of the invention also embrace pharmaceutical compositions which are formulated for local administration, such as by implants.

[0152] Compositions suitable for oral administration may be presented as discrete units, such as capsules, tablets, lozenges, each containing a predetermined amount of the active compound. Other compositions include suspensions in aqueous liquids or non-aqueous liquids such as a syrup, elixir or an emulsion. When the compounds described herein are used therapeutically, in certain embodiments a desirable route of administration may be by pulmonary aerosol.

[0153] In some embodiments, a compound provided by some aspects of the invention may be administered directly to a tissue. Direct tissue administration may be achieved by direct injection. A compound may be administered once or alternatively may be administered in a plurality of administrations. If administered multiple times, a compound may be administered via different routes. For example, the first (or the first few) administrations may be made directly into the affected tissue while later administrations may be systemic.

[0154] For oral administration, the compounds can be formulated readily by combining the active compounds with pharmaceutically acceptable carriers well known in the art. Such carriers enable the compounds of the invention to be formulated as tablets, pills, dragees, capsules, liquids, gels, syrups, slurries, suspensions and the like, for oral ingestion by a subject to be treated. Pharmaceutical preparations for oral use can be obtained as solid excipient, optionally grinding a resulting mixture, and processing the mixture of granules, after adding suitable auxiliaries, if desired, to obtain tablets or dragee cores. Suitable excipients are, in particular, fillers such as sugars, including lactose, sucrose, mannitol, or sorbitol; cellulose preparations such as, for example, maize starch, wheat starch, rice starch, potato starch, gelatin, gum tragacanth, methyl cellulose, hydroxypropylmethyl-cellulose, sodium carboxymethylcellulose, and/or polyvinylpyrrolidone (PVP). If desired, disintegrating agents may be added, such as the cross-linked polyvinyl pyrrolidone, agar, or alginic acid or a salt thereof such as sodium alginate. Optionally the oral formulations may also be formulated in saline or buffers for neutralizing internal acid conditions or may be administered without any carriers.

[0155] Dragee cores are provided with suitable coatings. For this purpose, concentrated sugar solutions may be used, which may optionally contain gum arabic, talc, polyvinyl pyrrolidone, carbopol gel, polyethylene glycol, and/or titanium dioxide, lacquer solutions, and suitable organic solvents or solvent mixtures. Dyestuffs or pigments may be added to the tablets or dragee coatings for identification or to characterize different combinations of active compound doses.

[0156] Pharmaceutical preparations which can be used orally include push-fit capsules made of gelatin, as well as soft, sealed capsules made of gelatin and a plasticizer, such as glycerol or sorbitol. The push-fit capsules can contain the active ingredients in admixture with filler such as lactose, binders such as starches, and/or lubricants such as talc or magnesium stearate and, optionally, stabilizers. In soft capsules, the active compounds may be dissolved or suspended in suitable liquids, such as fatty oils, liquid paraffin, or liquid polyethylene glycols. In addition, stabilizers may be added. Microspheres formulated for oral administration may also be used. Such microspheres have been well defined in the art. All formulations for oral administration should be in dosages suitable for such administration.

[0157] For buccal administration, the compositions may take the form of tablets or lozenges formulated in conventional manner.

[0158] For administration by inhalation, the compounds for use according to the present invention may be conveniently delivered in the form of an aerosol spray presentation from pressurized packs or a nebulizer, with the use of a suitable propellant, e.g., dichlorodifluoromethane, trichlorofluoromethane, dichlorotetrafluoroethane, carbon dioxide or other suitable gas. In the case of a pressurized aerosol the dosage unit may be determined by providing a valve to deliver a metered amount. Capsules and cartridges of, e.g., gelatin for use in an inhaler or insufflator may be formulated containing a powder mix of the compound and a suitable powder base such as lactose or starch.

[0159] The compounds, when it is desirable to deliver them systemically, may be formulated for parenteral administration by injection, e.g., by bolus injection or continuous infusion. Formulations for injection may be presented in unit dosage form, e.g., in ampoules or in multi-dose containers, with an added preservative. The compositions may take such forms as suspensions, solutions, or emulsions in oily or aqueous vehicles, and may contain formulatory agents such as suspending, stabilizing, and/or dispersing agents.

[0160] Preparations for parenteral administration include sterile aqueous or non-aqueous solutions, suspensions, and emulsions. Examples of non-aqueous solvents are propylene glycol, polyethylene glycol, vegetable oils such as olive oil, and injectable organic esters such as ethyl oleate. Aqueous carriers include water, alcoholic/aqueous solutions, emulsions or suspensions, including saline and buffered media. Parenteral vehicles include sodium chloride solution, Ringer's dextrose, dextrose and sodium chloride, lactated Ringer's, or fixed oils. Intravenous vehicles include fluid and nutrient replenishers, electrolyte replenishers (such as those based on Ringer's dextrose), and the like. Preservatives and other additives may also be present such as, for example, antimicrobials, anti-oxidants, chelating agents, and inert gases and the like. Lower doses will result from other forms of administration, such as intravenous administration. In the event that a response in a subject is insufficient at the initial doses applied, higher doses (or effectively higher doses by a different, more localized delivery route) may be employed to the extent that patient tolerance permits. Multiple doses per day are contemplated to achieve appropriate systemic levels of compounds.

[0161] Other delivery systems can include time-release, delayed release or sustained release delivery systems. Such systems can avoid repeated administrations of the compound, increasing convenience to the subject and the physician. Many types of release delivery systems are available and known to those of ordinary skill in the art. They include polymer base systems such as poly(lactide-glycolide), copolyoxalates, polycaprolactones, polyesteramides, polyorthoesters, polyhydroxybutyric acid, and polyanhydrides. Microcapsules of the foregoing polymers containing drugs are described in, for example, U.S. Pat. No. 5,075,109. Delivery systems also include non-polymer systems that are: lipids including sterols such as cholesterol, cholesterol esters and fatty acids or neutral fats such as mono- di- and tri-glycerides; hydrogel release systems; silastic systems; peptide based systems; wax coatings; compressed tablets using conventional binders and excipients; partially fused implants; and the like. Specific examples include, but are not limited to: (a) erosional systems in which the platelet reducing agent is contained in a form within a matrix such as those described in U.S. Pat. Nos. 4,452,775, 4,675,189, and 5,736,152 and (b) diffusional systems in which an active component permeates at a controlled rate from a polymer such as described in U.S. Pat. Nos. 3,854,480, 5,133,974 and 5,407,686. In addition, pump-based hardware delivery systems can be used, some of which are adapted for implantation.

[0162] Therapeutic formulations useful in the invention may be prepared for storage by mixing a kinase inhibitor having the desired degree of purity with optional pharmaceutically acceptable carriers, excipients or stabilizers (Remington's Pharmaceutical Sciences 16th edition, Osol, A. Ed. (1980)), in the form of lyophilized formulations or aqueous solutions. Acceptable carriers, excipients, or stabilizers are nontoxic to recipients at the dosages and concentrations employed, and include buffers such as phosphate, citrate, and other organic acids; antioxidants including ascorbic acid and methionine; preservatives (such as octadecyldimethylbenzyl ammonium chloride; hexamethonium chloride; benzalkonium chloride, benzethonium chloride; phenol, butyl or benzyl alcohol; alkyl parabens such as methyl or propyl paraben; catechol; resorcinol; cyclohexanol; 3-pentanol; and m-cresol); low molecular weight (less than about 10 residues) polypeptides; proteins, such as serum albumin, gelatin, or immunoglobulins; hydrophilic polymers such as polyvinylpyrrolidone; amino acids such as glycine, glutamine, asparagine, histidine, arginine, or lysine; monosaccharides, disaccharides, and other carbohydrates including glucose, mannose, or dextrins; chelating agents such as EDTA; sugars such as sucrose, mannitol, trehalose or sorbitol; salt-forming counter-ions such as sodium; metal complexes (e.g., Zn-protein complexes); and/or non-ionic surfactants such as TWEEN™, PLURONICS™ or polyethylene glycol (PEG).

### EXAMPLES

[0163] Two sets of large-scale, quantitative phospho-proteomics experiments were performed to fully define how mTOR-containing complexes signal to downstream effectors (FIG. 1A). The first SILAC experiment (rapamycin screen) was performed using growth factor-deprived TSC2−/− mouse embryonic fibroblasts (MEFs). Deletion of the TSC2 tumor suppressor gene decouples mTORC1 from many upstream inputs, leading to constitutive hyper-activation of mTORC1 signaling (7). mTORC1 is still potently and specifically inhibited by rapamycin in these cells, which provides a sensitized genetic background for the study of mTORC1 signaling in the absence of other mitogen-regulated phosphorylation cascades.

Global Quantitative Phosphoproteomics Defines the Signaling Networks Downstream of both mTORC1 and mTORC2

[0164] Two populations of TSC2−/− cells were grown in parallel, one in conventional media (“light”) and the other in media containing [¹³C₆¹⁵N₂]lysine and [¹³C₆¹⁵N₄]arginine (“heavy”) (FIG. 1A and Table 5). As shown in FIG. 5A, phosphopeptides were successfully enriched using a two-step SCX-IMAC procedure with the phosphopeptides representing 67.8% of the peptides identified. We performed two biological replicates of this experimental design with cross-labeling (swapping the labeled state of the rapamycin-treated cells, Table 5), from which a total of 14,635 (FDR=0.25%) and 32,500 (FDR=0.28%) phosphopeptides were identified, respectively. These corresponded to identification of at least 4,484 and 6,832 unique phosphorylation sites on 1,615 and 1,866 proteins, respectively. The quantitation was highly accurate (Table 5) with 93.7% of the phosphoproteome changing less than 50% in abundance between the rapamycin-treated (light) and control (heavy) cells (second biological replicate experiment, Median Log₂(H/L)=−0.02 and standard deviation Log₂(H/L)=0.53, FIG. 1A). Gene names and sequences of the phosphopeptides whose intensities decrease after rapamycin treatment (Rapamycin screen) are identified in Table 7. Note that the Rapamycin screen includes two biological replicates. For the first replicate (Table 7 Rapa Replicate 1), the light cells were controls whereas the heavy cells were treated with rapamycin. For the second replicate experiment (Table 7 Rapa Replicate 2), the light cells were treated with rapamycin and heavy cells were controls.

[0165] Based on the tight distribution of the quantified phosphopeptides, we considered phosphorylated peptides whose relative abundance decreased ≧2-fold as regulated in a rapamycin-sensitive fashion. Using this criteria, several hundred peptides (corresponding to 148 and 85 proteins respectively, in the two biological replicates, Table 11) were determined to contain rapamycin-sensitive phosphorylation sites. Table 11 identifies proteins with downregulated phosphorylation identified in the rapamycin and Ku-0063794 screen. Note that there are two biological replicate experiments for the rapamycin screen (“Table 11 Rapa Replicate 1,” and “Table 11 Rapa Replicate 2,” respectively) and one Ku-0063749 replicate (“Table 11 Ku”). Treatment for the light and heavy cells in each experiment is described in FIG. 1C. We observed a similar distribution for the phosphopeptides in the first biological replicate experiment and found 85 proteins (Table 11) that carried rapamycin-sensitive phosphorylation sites. In addition, there was a substantial overlap in the down-regulated proteins between replicates and 40 of these proteins were found in both experiments (FIG. 5B).

[0166] For the Ku-screen, wild-type MEFs were grown in light and heavy SILAC media and starved overnight for serum. The light cells were treated with 20 nM rapamycin for 2 hrs, while the heavy cells were treated in parallel with a combination of 20 nM rapamycin and 2 μM of Ku-0063794 for 2 hrs. Both the light and heavy cell were subsequently stimulated with insulin for 15 minutes and samples were pooled and analyzed by quantitative mass spectrometry. Ku-0063794 is a recently identified compound that competitively inhibits mTOR kinase activity by occupying the ATP-binding pocket (FIG. 5C) (4, 11). For the Ku-screen, a total of 34,642 phosphopeptides were identified with a false discovery rate of 0.28%, which corresponded to identification of 6,220 unique phosphorylation sites on 1,867 proteins (Table 5). Gene names and sequences of the phosphopeptides whose intensities decrease after Ku-0063794 treatment are identified in Table 8. Note that the light cells were treated with rapamycin and serve as controls whereas the heavy cells were treated with a combination of rapamycin and Ku-0063794. A very tight distribution of phosphopeptides was observed (Median Log₂(H/L)=−0.03 and standard deviation Log₂(H/L)=0.34) and phosphorylated peptides whose relative abundance decreased ≧2-fold were considered regulated by Ku-sensitive, but rapamycin-insensitive mTOR signaling (FIG. 1A). Using these criteria, 100 proteins were determined to contain downregulated phosphorylation after Ku-0063794 treatment (Table 11). The identified phopho-proteins included many known downstream targets of mTORC2 (Table 6), including GSK3β, Braf, Akt1s1 (Akt substrate) and NDRG1 (SGK substrate). Combining the data from both the Rapa-screen and the Ku-screen, we identified a total of 81,777 phosphopeptides, and more than 11,271 unique phosphorylations sites on 2,778 proteins, with 9,694 of the sites confidently localized (A score ≧13) (Table 5).

Phosphorylation Specificity of the Downstream Effectors in the mTORC1 and mTORC2 Signaling Networks

[0167] Table 9 describes the classification of mTOR targets identified in the rapamycin and Ku-0063794 screens. Class I includes downstream effectors of rapamycin-sensitive mTORC1. Class II includes downstream effectors of rapamycin-insensitive mTORC1 or mTORC2. Class II includes the proteins downstream of both mTORC1 and mTORC2. Names of the genes and the sequences of the phosphopeptides are shown.

[0168] Class I sites represent phosphorylation events that are mediated by rapamycin-sensitive mTORC1/S6K signaling, (e.g. phospho-rpS6 S235/S236 phosphorylation).

[0169] Class II sites represent phosphorylation events mediated by rapamycin-insensitive mTORC1 or mTORC2 function. For example, 4EBP1 T36/T45 phosphorylation, previously characterized as a rapamycin insensitive mTORC1 substrate (12), only decreased slightly (20%) after rapamycin treatment, while phosphorylation at these sites decreased dramatically (7.2-fold) in the Ku-0063794 screen (FIGS. 1C, 5C and 6A). As another example, NDRG1 was also identified to contain Class II phosphorylation sites at S330/S333 (FIGS. 1C and 6B) and was recently shown to be a substrate of SGK (8), whose activation is under the control of mTORC2.

[0170] Class III represents phosphorylation sites that are both the rapamycin-sensitive and Ku-sensitive mTOR substrates. For example, GSK3β S9 phosphorylation is down-regulated by approximately 3.3-fold and 2.2-fold in the rapamycin and Ku-0063794 screens, respectively (FIGS. 1C and 6C), consistent with the previous observation that it can be a substrate of both Akt and S6K (9). As another example for the Class III phosphorylation, the abundance of mTOR autophosphorylation at S2478/S2481 decreased 3.6-fold in the rapamycin screen (FIG. 7A). Surprisingly, it was previously shown that S2481 is a conserved, rapamycin-insensitive, autophosphorylation site of mTOR (FIG. 7B) (20). Immunoblot analysis confirmed that site was indeed rapamycin-sensitive (FIGS. 5C and 7C). Intriguingly, acute rapamycin treatment only led to partial dephosphorylation of this site. In contrast, mTOR S2481 phosphorylation was completely abolished as a result of mTOR kinase inhibitor treatment (FIGS. 5C and 7D). Taken together, the data demonstrate that mTOR S2481 phosphorylation is regulated in both a rapamycin sensitive- and insensitive-manner.

[0171] There were several surprising examples of phosphopeptides that are insensitive to both rapamycin and Ku-0063794 as identified by the two phosphoproteomics screens. The intensity of a T70 singly phosphorylated 4EBP 1 peptide did not change in either the rapamycin or the Ku-0063794 screen (FIGS. 1C and 6A), indicating the 4EBP T70 is not phosphorylated by mTOR in this context. Indeed, several reports suggested that this site might be targeted by ERK2, another proline-directed kinase (21). In addition, we found that the 4EBP-1 S85/S 100 phosphorylation was also mTOR-independent (FIG. 1C).

Linking Phosphorylation Events to the Biological Processes Regulated by mTORC1 and mTORC2

[0172] To assess the predicated effects of mTOR inhibition in cells as a result of either rapamycin or Ku-0063794 treatment, we mapped the downregulated proteins in the two screens to Gene Ontology (GO) terms with respect to Biological Process (BP) and also performed gene functional classification analysis of these proteins. Table 10 describes the results of GO analysis of the hits identified in the rapamycin and Ku-0063794 screens. Pathways that the rapamycin-sensitive and Ku-0063794-sensitive hits overrepresented are shown in “Table 10 Rapa pathways” and “Table 10 Ku pathways”, respectively. Also shown is the biological process that the rapamycin-sensitive and Ku-0063794-sensitive hits overrepresented (Table 10 Rapa BP GO, and Table 10 Ku BP GO, respectively). Interestingly, for the rapamycin screen, the top enriched BPs included negative regulation of macromolecule metabolic process (P=4.2×10⁻⁷), negative regulation of cellular biosynthetic process (P=4.2×10⁻⁶), response to insulin stimulus (P=2.6×10⁻⁴), negative regulation of transcription (P=2.7×10⁻⁴) and vesicle-mediated transport (P=6.0×10⁻⁴). By grouping the hits based on functional similarities, we also found that the downregulated proteins in the rapamycin screen were enriched for kinases (P=2.1×10⁻²⁰), WD40-repeat containing proteins (P=8.9×10⁻¹²), proteins involved in transcription regulation (P=3.1×10⁻⁹) and proteins involved in RNA processing (P=3.3×10⁻⁵). The identification of many kinases in the downregulated proteins provides interesting points for potential signal integration and crosstalk. One example is the Ser/Thr kinase, unc-51-like kinase 1 (ULK1). Previously published research has demonstrated that ULK1 is positively involved in autophagy response (22). ULK1 has also been shown to interact with mTORC1 through binding to raptor (23). We identified three phosphorylation sites on ULK1 (S747/S757/T763) that showed a 4-fold downregulation after rapamycin treatment (Table 1), suggesting that ULK1 is likely a bona fide mTORC1 substrate. As mTORC1 is known to antagonize macroautophagy, it is tempting to speculate that mTORC1 negative regulates ULK1 either directly or indirectly via inhibitory phosphorylation events. Interestingly, in mammalian cells, knockdown of the related kinase ULK2 had no effect on the autophagic response (22). Interestingly, all three of the rapamycin-sensitive ULK1 phosphorylation sites are proline-directed (SP or TP), whereas two of the three comparable sites in ULK2 possess a C-terminal alanine, making it unlikely that these residues are similarly phosphorylated by mTORC1 (FIG. 7E).

[0173] For the downregulated proteins identified in the Ku-0063794 screen, the top enriched BPs included lamellipodium assembly (P=0.003), protein amino acid phosphorylation (P=0.007), the insulin receptor signaling pathway (P=0.01), actin filament-based process (P=0.015) and nucleocytoplasmic transport (P=0.015). Gene functional classification analysis revealed that the downregulated proteins were enriched for ATP-binding proteins (P=2.4×10⁻¹¹) and zinc-finger domain containing proteins (P=2.1×10⁻⁴). Intriguingly, it has been suggested that mTORC2 promotes organization of the actin cytoskeleton upon growth factor stimulation through a mechanism that is poorly defined. The identification of a total of 10 proteins (CCDC88A, ARHGEF17, NCK1, myo9b, Mtap1b, Epb4.113, vel, Spnb2, FLNC, Npm1) in the Ku-0063794 screen that are related to cytoskeleton regulation provides an opportunity for the discovery of novel points of regulation. For example, we identified a peptide from filamin-C (FLNC) in the Ku-0063794 screen that was singly phosphorylated at S2234 (FIG. 2). S2234 is localized in an AGC kinase substrate motif (RERLGS*F, SEQ ID NO: 22) and has previously been shown to be phosphorylated by Akt in vitro (24). We found S2234 could be categorized as a Class II phosphorylation site (rapamycin-insensitive and Ku0063794-sensitive, FIG. 2 and Table 1), suggesting that it is not an S6K substrate but rather the substrate of Akt or SGK. FLNC crosslinks actin filaments into a three-dimensional network and is involved in assembling signaling complexes near the cell membrane (25). Interestingly, filamin-A (FLNA) has been shown to be phosphorylated at a similar site (S2152, RRRAPS*V, SEQ ID NO: 23) by RSK and Pak protein kinases which regulates FLNA function in cell migration (26). It will clearly be of great interest to investigate whether mTORC2 regulates actin assembly and cell migration through Akt- or SGK-mediated phosphorylation of FLNC and whether this phosphorylation coordinates regulation of these processes with Ras-, Cdc42- and Rac-mediated phosphorylation of FLNA.

[0174] The analysis identified 4,484 and 6,832 unique phosphorylation sites on 1,615 and 1,866 proteins from two biological replicate experiments, respectively, and achieved a high level of accuracy in quantitation (Table 5). Several hundred peptides corresponding to 148 and 85 proteins in the two replicates (Table 11) were determined to contain rapamycin-sensitive phosphorylation sites (defined as phosphorylated peptides whose relative abundance decreased ≧2-fold in response to rapamycin treatment). There was a substantial overlap in the downregulated proteins between the replicates, as 40 proteins were found in both experiments (FIG. 5B). Supporting the validity of the approach, many known effectors of the mTORC1 signaling pathway were identified in the downregulated population (Table 6), including p70S6K, 4EBP1/2, Akt1s1 (PRAS40), rpS6, eIF4B, eIF4G1 and GSK3β. A representative identification of the known rapamycin-sensitive phosphorylation sites on ribosomal protein S6 is shown in FIG. 1B.

[0175] Rapamycin is an allosteric inhibitor that only partially inhibits mTORC1 signaling and has no effect on the activity of mTORC2 under short-term treatment conditions (3). In contrast, newly discovered ATP-competitive mTOR inhibitors block the activity of both mTORC1 and mTORC2 (2). To identify rapamycin-insensitive mTORC1, and mTORC2 substrates, we used the mTOR kinase inhibitor Ku-0063794 and performed a second SILAC experiment (Ku-0063794 screen) (FIG. 1A). The light cells were treated with 20 nM rapamycin for 2 hrs, while the heavy cells were treated in parallel with a combination of 20 nM rapamycin and 2 μM of Ku-0063794 for 2 hrs. Both the light and heavy cells were subsequently stimulated with insulin for 15 minutes and samples were pooled and analyzed by quantitative mass spectrometry. By creating a rapamycin-inhibited background in both the light and heavy cells, the combination of insulin stimulation and treatment with the mTOR kinase inhibitor leads to the identification of proteins specficially phosphorylated by rapamycin-insensitive mTOR signaling and kinases activated downstream of mTORC2 such as Akt and SGK.

[0176] In this experiment, one hundred proteins were determined to contain down-regulated phosphorylation after Ku-0063794 treatment (Table 11). The identified phospho-proteins included many known downstream targets of mTORC2 (Table 6), including GSK313, Braf, Akt1s1 (Akt substrates) and NDRG1 (SGK substrate).

[0177] To identify the specific downstream effectors of the two mTOR complexes, we compared the fold-change in phospho-peptides identified in both the rapamycin and Ku-0063794 screens (FIG. 1C). As expected, the majority of phospho-peptides in the cell are not affected by either rapamycin or Ku-0063794 treatment and show a heavy:light ratio close to 1:1 in both screens. However, there are clearly phosphopeptides that are mediated by mTORC1 and/or mTORC2 signaling, which can further be divided into three categories. Class I sites include rapamycin-sensitive events that are not further decreased by Ku-0063794 treatment, and represent canonical mTORC1 downstream effectors, such as rpS6 S235/236 phosphorylation (FIG. 1C). Class II sites include Ku-0063794-sensitive events that are not affected by rapamycin treatment and represent either rapamycin-resistant mTORC1 downstream effectors, such as 4EBP1 T36/T45 (FIGS. 1C, 5C and 6A), or sites downstream of the mTORC2 signaling, such as the recently described SGK-mediated NDRG1 S330/S333 phosphorylation events (FIGS. 1C and 6B) (8). Finally, Class III sites are sensitive to both compounds. For example, GSK3β S9 phosphorylation is downregulated in both the rapamycin and Ku-0063794 screens (FIGS. 1C and 6C), consistent with the previous observation that GSK313 can be a substrate of both Akt and S6K (9). In addition, we identified mTOR autophosphorylation at S2481 as a Class III site that is regulated in both a rapamycin sensitive- and insensitive-manner (FIG. 7) (these target classes are discussed in more detail elsewhere herein).

[0178] We performed pathway analysis using DAVID (10), to determine the signaling networks that are statistically overrepresented by the hits in the rapamycin and Ku-0063794 screens (FIGS. 1D and 5D). Not surprisingly, proteins with downregulated phosphorylation in both screens were highly enriched for the canonical mTOR pathway (P=1.6×10⁻⁶, ranked first, for the rapamycin screen and P=0.0014, ranked second, for the Ku-0063794 screen).

[0179] Interestingly, one of the enriched GO classes in the rapamycin screen is the transmembrane receptor protein tyrosine kinase (RTK) signaling pathway (P=0.01), suggesting that mTORC1 might inhibit proteins in the upstream PI3K and MAPK pathways through modulating the activities of these RTKs. In particular, we observed that phosphorylation of two sites on the growth factor receptor-bound protein 10 (Grb10, S501/S503, ⁴⁹⁶MNILSS*QS*PLHPSTLNAVIHR⁵¹⁶ (SEQ ID NO: 24), mass error=2.32 ppm, Xcorr=4.39) was strongly inhibited by rapamycin (FIGS. 2A and 8A). The level of phosphorylation decreased by more than 27-fold after a 2 h rapamycin treatment (Table 6). The intensity of a triply phosphorylated Grb10 peptide (T76/S96/S104, insufficient MS/MS fragment ions to localize T76) also decreased by about five-fold after rapamycin treatment (Table 6). In contrast, phosphorylation of two other Grb10 sites, 5455 and 5458, did not change after a 2-hr rapamycin treatment (FIG. 8B), suggesting that decreased S501/S503 phosphorylation was not the result of a change in Grb10 protein abundance.

[0180] Grb10 belongs to the growth factor receptor-bound (Grb) protein family, which contains Grb7, Grb10 and Grb14. Members of this protein family serve as cellular adaptor proteins that bind to activated receptor tyrosine kinases (11). Grb10 has an N-terminal Ras-associating (RA) domain, a PH domain, a C-terminal SH2 domain and a BPS (between PH and SH2) domain, in which the two rapamycin-sensitive phosphorylation sites reside (FIG. 2B). The S501/S503 sites, and their flanking sequences, are highly conserved in vertebrates (FIG. 2B), suggesting that they could be functionally relevant and phosphorylated by a common evolutionarily conserved kinase, such as mTOR.

[0181] We developed a phosphospecific antibody (FIGS. 9A and 9B) to further characterize these two Grb10 phosphorylation sites. Treatment of TSC2−/− MEFs with 20 nM rapamycin induced rapid dephosphorylation of Grb10, within 15 min, and remained completely inhibited for the remainder of the time course examined (FIG. 2C). The dephosphorylation kinetics correlated well with that of S6K. We also found that Grb10 phosphorylation at S501/S503 is sensitive to amino acid availability in TSC2−/− MEFs (FIG. 2D).

[0182] To determine whether the Grb10 S501/S503 sites can be phosphorylated by other kinases, we treated TSC2−/− cells with staurosporine, a broad-spectrum kinase inhibitor that does not suppress mTOR activity (12). No change in the phosphorylation level of Grb10 S501/S503 phosphorylation was observed in response to staurosporine treatment (FIG. 2E). In contrast, treatment of Ku-0063794 led to a dose-dependent dephosphorylation of Grb10, correlating with the dephosphorylation of mTOR, 4EBP and rpS6. Interestingly, S6K activity was inhibited by staurosporine treatment, as shown by a complete loss of rpS6 phosphorylation, suggesting that Grb10 S501/S503 was directly phosphorylated by mTORC1 rather than by S6K.

[0183] We further investigated the effects of growth factor stimulation and rapamycin-mediated inhibition on Grb10 phosphorylation in other cell types. Wild-type MEFs were serum-starved and then stimulated with either insulin or 10% serum, both of which led to a robust increase in Grb10 phosphorylation (FIG. 2F). The insulin- or serum-induced increase in Grb10 phosphorylation was completely blocked by rapamycin pre-treatment. It was previously reported that Grb10 S503 (S476 in human Grb10 isoform 3) was phosphorylated by ERK1/2 in vitro (13). We found that inhibiting MEK by using AZD6244 completely abolished the activities of ERK but had no effect on Grb10 S501/S503 phosphorylation (FIG. 2F), indicating that phosphorylation at these two sites on Grb10 is not mediated by ERK in vivo. We also tested other mTOR catalytic site inhibitors, including LY294002, NVP-BEZ235, torin and pp 242 (14), all of which completely abolished Grb10 S501/S503 phosphorylation (FIG. 2G).

[0184] We next examined the in vivo interaction between Grb10 and the components of the mTOR complexes. We co-overexpressed HA-tagged Grb10 with Myc-tagged raptor or rictor in HEK293T cells. Grb10 was found to interact with raptor, but not rictor, suggesting Grb10 is a binding partner of mTORC1, but not mTORC2 (FIG. 3A). To further evaluate the possibility that Grb10 is a substrate of mTORC1, we prepared recombinant Grb10 from bacteria and subjected it to an in vitro kinase assay using recombinant mTOR. As shown in FIG. 3B, Grb10 was robustly phosphorylated by recombinant mTOR at S501/S503.

[0185] We found long-term inhibition of mTORC1 by rapamycin led to a significant decrease in Grb10 protein levels (FIG. 3C) while Grb10 mRNA levels showed a modest (approximately 2-fold) decrease, suggesting mTORC1 activity positively regulates Grb10 expression at both the transcriptional and post-translational levels. Similarly, knockdown of the mTORC1 component raptor led to a decreased level of Grb10 protein, correlating with diminished mTORC1 activity, as shown by phospho-4EBP levels (FIG. 3D). In addition, long-term treatment with mTOR kinase inhibitors, including LY-294002, NVP-BEZ235, torin and pp 242 all led to reduced Grb10 protein expression (FIG. 9C). Similar results were obtained in TSC1−/− MEFs (FIG. 9D). In contrast, we found Grb10 was highly overexpressed in TSC2−/− and TSC1−/− MEFs compared with their wild-type counterparts (FIGS. 3E and 9E), correlating with elevated mTORC1 activity in these cells.

[0186] To explore whether mTORC1-mediated Grb10 stabilization depends on phosphorylation on S501/S503, we transfected WT-Grb10, Grb10-S501A/S503A (AA) mutant and Grb10-S501D/S503D (DD) mutant into HEK293T cells. Exogenous wild type (WT) and DD mutant Grb10 proteins were expressed at equal levels, while expression of the AA mutant was markedly reduced, suggesting lower protein stability for the unphosphoryated form of Grb10 (FIG. 3F). To confirm this result, we generated TSC2−/− MEFs stably expressing the HA-tagged Grb10-DD mutant and treated these cells with rapamycin. Long-term rapamycin treatment decreased endogenous, wild-type Grb10 levels but had no effect on the DD mutant protein levels (FIG. 3G). To rule out the possibility that this result was an artifact based on protein overexpression, we repeated the experiment on TSC2−/− cells expressing HA-tagged wild-type Grb10, in which rapamycin treatment decreased both the endogenous and ectopically expressed Grb10 (FIG. 9F). These data support a critical role for mTORC1 in stabilizing Grb10 through phosphorylation of the S5011S503 residues.

[0187] Grb10 has been suggested to function as a negative regulator of the insulin signaling pathway. In mice with genetically disrupted Grb10 function, overgrowth of both the embryo and placenta was observed, and these mice are approximately 30% larger than normal at birth (15). In addition, enhanced activity of the insulin-stimulated PI3K/Akt pathway was observed in insulin target tissues, including skeletal muscle and adipose tissue (16). We examined the role of mTORC1-mediated Grb10 protein stabilization and accumulation in mTORC1 mediated negative feedback on the PI3K/Akt pathway.

[0188] As expected from previous reports (5, 6), both the PI3K/Akt and MAPK pathways were highly suppressed in TSC2−/− cells due to constitutively elevated mTORC1 activity. In contrast, Akt was strongly activated in Grb10 knockdown cells under both serum-starved and insulin/IGF stimulation conditions (FIG. 4A). In addition, Grb10 knockdown also led to ERK hyperactivation upon insulin/IGF stimulation. Conversely, overexpression of Grb10 in HEK293 cells substantially interfered with activation of PI3K, as judged by decreased Akt T308 phosphorylation (FIG. 10A). The observed inhibition was not affected by the phosphorylation status of S501/S503. Previous work demonstrated that Grb10 interferes with insulin-mediated PI3K activation by binding to, and inhibiting, the insulin receptor (11). We confirmed this observation and demonstrated that Grb10 overexpression interferes with insulin receptor-dependent IRS phosphorylation and subsequent PI3K recruitment (FIGS. 10B, 10C and 10D).

[0189] The current model of the negative feedback loop from mTORC1 to PI3K involves S6K-mediated phosphorylation and subsequent degradation of IRS 1/2 (6). However, it has also been shown that overexpression of a dominant-negative, kinase-deficient S6K1 failed to completely recapitulate the hyperactivation of Akt induced by overexpression of kinase-dead mTOR, suggesting mTORC1 is directly involved in modulating this feedback inhibition loop (17). Our data clearly show that hyperactivation of mTORC1/S6K promotes feedback loop inhibition of PI3K through a two-prong mechanism: (1) mTORC1/S6K-mediated phosphorylation and degradation of a positive regulator of PI3K signaling, IRS, and (2) mTORC1-mediated phosphorylation and accumulation of a negative regulator of PI3K signaling, Grb10.

[0190] Numerous genetic alterations in cancers result in hyperactivation of the mTOR complexes. Based on these observations, rapamycin analogues are currently approved, or being assessed in various clinical trials, as targeted therapeutics against several cancer subtypes. However, with a few exceptions, the current results have been disappointing, as the clinical outcome of rapamycin treatment is unpredictable and rapamycin is largely ineffective as a monotherapy (3). In particular, it has been shown that post-surgical, maintenance rapamycin treatment led to PI3K/Akt activation in glioblastoma patients, and this activation was associated with shorter time-to-progression (4). We asked whether PI3K hyperactivation induced by Grb10 knockdown (which phenotypically mimics rapamycin-induced Grb10 depletion) would contribute to the survival of cells undergoing stress-induced apoptosis. In response to either staurosporine or etoposide, reduced caspase 3 cleavage was observed in Grb10 knockdown cells compared to control cells. These results indicate that Grb10 depletion is sufficient to protect cells from apoptosis (FIGS. 4B and 10E). Combined with the recent finding that rapamycin can protect cells from energy stress-induced death (18), these results provide a plausible mechanism as to why the effect of rapamycin therapy is cytostatic rather than cytotoxic in some types of cancers and suggest a complete understanding of the feedback inhibition control will be critical in designing combination therapy involving rapamycin and DNA-damaging reagents or reagents targeting metabolic pathways.

[0191] To explore the role of Grb10 in cancer progression, we performed a comprehensive meta-analysis of GRB10 expression based on published microarray data. GRB10 expression is significantly down-regulated in many tumor types compared to their normal tissue counterparts (FIG. 4C). The most profound down-regulation was observed in infiltrating bladder urothelial carcinoma, glioblastoma, breast, myeloma, prostate and pancreatic cancers. Given that loss of Grb10 results in a dramatic activation of the PI3K/Akt pathway (FIG. 4A), we performed correlation analysis between variations in the expression of GRB10 and PTEN, a known negative regulator of the PI3K/Akt pathway and tumor suppressor gene. While both GRB10 and PTEN are ubiquitously down-regulated, in all cases there was a significantly (p<0.05) negative correlation between GRB10 and PTEN expression. The most striking differences were observed in breast carcinoma (Pearson correlation coefficient=−0.7, p=0.02) and myeloma (Pearson correlation coefficient=−0.82, p=0.001) (FIG. 4D). The data suggest that GRB10 loss provides an alternative mechanism of PI3K/Akt activation when PTEN expression is retained. It is particularly compelling that this correlation is only observed in tumor samples but not the normal tissue controls (FIG. 4E). It has been previously reported that PIK3CA mutations and PTEN loss are mutually exclusive in breast cancer (19), suggesting that an increased level of PIP₃ resulting from of genetic alteration of either PIK3CA or PTEN relieves selective pressure targeting the other gene. Similarly, Grb10 loss, which results in PI3K hyperactivation, might provide the cells with growth and survival advantages that are redundant with respect to PTEN loss-of-function, suggesting that Grb10 might be a novel tumor suppressor that is regulated by mTORC1. These data point to the exciting therapeutic prospects of targeting Grb10 stability in cancer therapy.

### Materials and Methods

### Cells and Reagents

[0192] Human embryonic kidney (HEK) 293E cells, immortalized wild-type mouse embryonic fibroblast (MEF) cells and TSC2−/− MEFs (a kind gift from David Kwiatkowski, Brigham and Women's Hospital) were maintained in Dulbecco's modified Eagle's medium (DMEM) supplemented with 10% fetal bovine serum. In collaboration with Millipore Inc., we generated anti-phospho-5501/S503-Grb10 antibodies. Anti-mTOR, anti-phospho-mTOR (S2481), anti-Grb10 (human), anti-phospho-Akt (S473), anti-phospho-Akt (T308), anti-Akt, anti-S6K, anti-phospho-S6K (T389), anti-IRS2, anti-PARP, anti-caspase 3, anti-4EBP, anti-4EBP (T37/T46), anti-phospho-ribosomal protein S6 (S235/S236), and anti-ribosomal protein S6 antibodies were obtained from Cell Signaling Technology. Anti-phospho-ERK1/2 antibody, insulin, Phorbol Myristate Acetate (PMA), Epidermal Growth Factor (EGF) and polybrene were purchased from Sigma. Anti-Grb10 (mouse), anti-phospho-IRS (Y612), anti-p85 and anti-p110 of PI3K antibodies were purchased from Santa Cruz, Invitrogen, Millipore and BD, respectively. ERK1/2 antibody and anti-HA antibody were prepared in the lab. LY294002 and AktVIII inhibitor were purchased from Calbiochem. Lipofectamine 2000 was purchased from Invitrogen. Torin was kindly provided by Nathanael Gray (Dana Farber Cancer Institute).

### SILAC Cell Culture

[0193] TSC2−/− MEFs were used in the rapamycin screen due to constitutive hyperactivation of mTORC1 signaling in this cell line. Cells were grown in light ([¹²C₆¹⁴N₂]Lys, [¹²C₆¹⁴N₄]Arg) and heavy ([¹³C₆¹⁵N₂]Lys, [¹³C₆¹⁵N₄]Arg) DMEM (Cambridge Isotope Labs), respectively. Both light and heavy DMEM were supplemented with 10% dialyzed FBS (Invitrogen). Cells were serum-deprived for 17 hours and cells were cultured inheavy media were treated with 20 nM rapamycin for two hours. We performed two biological replicates of this experimental design with cross-labeling (swapping the labeled state of the rapamycin-treated cells). For the purposes of illustration, the data for biological replicate #2 is presented in FIGS. 1A and 1D.

[0194] The Ku-0063794 screen was performed using wild-type (WT) MEFs. Cells were grown in the aforementioned SILAC media. Both the light and heavy cells were starved of serum for 17 hrs. The light cells were treated with 20 nM rapamycin for 2 hrs, while the heavy cells were treated with a combination of 20 nM rapamycin and 2 μM Ku-0063794 for 2 hrs. Both the light and heavy cells were then stimulated with 100 nM insulin for 15 min.

### Sample Preparation for Mass Spectrometric Analysis

[0195] The heavy and light cells were lysed in urea buffer (8 M urea, 20 mM HEPES pH 7.0, 75 mM β-glycerolphosphate, 1 mM sodium vanadate, 1 mM DTT and 1.5 mM EGTA) and the lysates were combined at a 1:1 ratio. Lysates were reduced by adding DTT to a final concentration of 3 mM, followed by incubation at room temperature for 20 min. Cysteines were alkylated by adding iodoacetamide to a final concentration of 50 mM, followed by incubation in the dark for 20 min. The lysates were diluted to a final concentration of 2 M urea by addition of 100 mM NH₄OAC and were digested overnight with sequencing-grade trypsin (Promega) at a 1:100 (enzyme:substrate) ratio. Digestion was quenched by addition of trifluoroacetic acid to a final concentration of 0.1% and precipitates were removed by centrifugation at 4,000 rpm for 30 min. Peptides were desalted on SepPak C18 columns (Waters) according to manufacturer's instructions.

[0196] Phosphopeptides were enriched by SCX-IMAC (27). Briefly, lyophilized peptides were resuspended in 500 μl SCX buffer A (5 mM KH₂PO₄, pH 2.65, 30% acetonitrile) and injected onto a SCX column (Polysulfoethyl aspartamide, 9.4 mm×200 mm, 5 μM particle size, 200 Å pore size, PolyLC). Gradient was developed over 35 min ranging from 0% to 21% buffer B (5 mM KH₂PO₄, pH 2.65, 30% acetonitrile, 350 mM KCl) at a flow rate of 2 ml/min. Twelve fractions were collected and lyophilized. Peptides were then desalted using SepPak C18 columns and were subjected to IMAC (Sigma) for phosphopeptide enrichment. The eluate was further desalted using STAGE tips (28) and lyophilized.

### Mass Spectrometry Analysis and Data Processing

[0197] The rapamycin screen samples were analyzed by LC-MS/MS on an LTQ-Orbitrap mass spectrometer (Thermo, San Jose, Calif.) using the top ten method. The Ku-0063794 screen samples were analyzed on an LTQ-Velos mass spectrometer (Thermo Fischer Scientific, San Jose, Calif.) using the top twenty method. MS/MS spectra were searched against a composite database of the mouse IPI protein database (Version 3.60) and its reversed complement using the Sequest algorithm. Search parameters allowed for a static modification of 57.02146 Da for Cys and a dynamic modification of phosphorylation (79.96633 Da) on Ser, Thr and Tyr, oxidation (15.99491 Da) on Met, stable isotope (10.00827 Da) and (8.01420 Da) on Arg and Lys, respectively. Search results were filtered to include <1% matches to the reverse data base by the linear discriminator function (Huttlin et al., manuscript in preparation) using parameters including Xcorr, dCN, missed cleavage, charge state (exclude 1+ peptides), mass accuracy, peptide length and fraction of ions matched to MS/MS spectra. Phosphorylation site localization was assessed by the Ascore algorithm (29) based on the observation of phosphorylation-specific fragment ions and peptide quantification was performed by using the Vista algorithm (30, 31).

[0198] We further filter the peptides according to the following criteria for quantitation of the peptide abundance changes: (1) Vista confidence score must be at least 85, (2) signal to noise ratio (S/N)≧3 for both the heavy and light peptides, (3) in the cases where one of the isotopic species has an S/N of ≦3, S/N of the other was required to be ≧5, and (4) in the cases where only the heavy or light version of a peptide was found, we reported the peak S/N ratio, or its inverse, as a proxy for relative abundance measurement. For such peptides, we also required S/N of at ≧5 for the observed species.

### Plasmids

[0199] The cDNA for human Grb10 (NCBI gene symbol GRB10; Gene ID: 2887) was obtained from Invitrogen and amplified by PCR. The product was subcloned into (1) the BamH I and EcoR I sites of pKH3, (2) the BamH I and EcoR I sites of pGEX-4T-3 or (3) the Hind III and EcoR I sites of pLPCX. The Grb10 point mutant constructs were generated using the QuickChange site-directed mutagenesis kit (Stratagene). pRK5-Myc-raptor andpRK5-Myc-Rictor were kindly provided by David Sabatini (MIT). Lentiviral plasmids (Δ8.9 and VSVG) were kind gifts from Andrew Kung (Dana Farber Cancer Institute) and David Baltimore (California Institute of Technology).

### Immunoprecipitation

[0200] Cells were extracted with lysis buffer A (40 mM HEPES, pH 7.5, 120 mM NaCl, 1 mM EDTA, 10 mM β-glycerophosphate, 50 mM NaF, 2 mM phenylmethylsulfonyl fluoride, 2 mg/ml aprotinin, 2 mg/ml leupeptin, and 1 mg/ml pepstatin, 1 mM DTT) containing 1% Triton X-100, 1% NP-40, or 0.2% CHAPS. After centrifugation, supernatants were collected and pre-cleared for 1 h with protein A- and G-Sepharose beads (GE Healthcare Biosciences). After centrifugation at 3,000 rpm for 5 min, the supernatants were incubated with the antibody at 4° C. for 2 h, and then incubated with protein A- and G-Sepharose for an additional hour. Beads were washed four times with the lysis buffer and eluted in 2× reducing sample buffer.

Mammalian Lentiviral shRNAs

[0201] Lentiviral short hairpin RNA (shRNA) expression vectors were a kind gift from William Hahn (Dana Farber Cancer Institute). To generate the lentiviruses, shRNA plasmids were co-transfected into HEK293TD cells along with packaging (Δ8.9) and envelope (VSVG) expression plasmids using lipofectamine 2000 (Invitrogen). Two days after transfection, viral supernatants were harvested and filtered. Recipient cells were infected in the presence of a serum-containing medium supplemented with 8 μg/ml polybrene. Following infection for 36 h, cells were treated with 2.0 μg/ml puromycin (Sigma) and cell lines that stably expressed the shRNAs were selected. Knockdown efficiencies were examined by immunoblot assay using antibodies against the target protein.

### Immunoblot Analysis

[0202] For immunoblot analysis, the cells were extracted in lysis buffer (20 mM HEPES (pH 7.5), 1% Triton X-100, 150 mM NaCl, 10 mM EDTA, 1 mM EGTA, 1 mM sodium orthovanadate, 1 mM NaF, 2 mM phenylmethylsulfonyl fluoride, 2 mg/ml aprotinin, 2 mg/ml leupeptin, and 1 mg/ml pepstatin), and extracts were mixed with the 5× reducing buffer (60 mM Tris-HCl, pH 6.8, 25% glycerol, 2% SDS, 14.4 mM 2-mercaptoethanol, 0.1% bromophenol blue). Samples were boiled for 5 min and subject to electrophoresis using the standard SDS-PAGE method. Proteins were then transferred to a nitrocellulose membrane (Whatman). The membranes were blocked with a TBST buffer (25 mM Tris-HCl, pH 7.5, 150 mM NaCl, 0.05% Tween 20) containing 3% nonfat dried milk, and probed overnight with primary antibodies at 4° C. and for 1 h at RT with peroxidase-conjugated secondary antibodies. Blots were developed using enhanced chemiluminescence, exposed on autoradiograph film and developed using standard methods.

### Recombinant Protein Purification

[0203] For the purification of GST-tagged proteins, plasmids were transformed into Escherichia coli strain BL21 (DE3), and purified to homogeneity from crude lysates using glutathione-sepharose beads (GE Healthcare) according to the manufacture's protocol. Briefly, protein production was initiated by adding isopropyl-D-thiogalactopyranoside (Sigma) to the cultures. Bacteria were collected by centrifugation, resuspended in PBS and lysed by sonication. After centrifugation at 13,000 rpm for 15 min, the supernatant was incubated with glutathione-sepharose beads for 1 h. The beads were washed with PBS three times and the recombinant protein was eluted with PBS containing 20 mM reduced glutathione. Proteins were dialyzed against PBS and stored at −80° C. until use.

### Quantitative RT-PCR Analysis

[0204] Total cellular RNA was purified from cultured cells using the RNeasy mini kit (Qiagen) following the manufacturer's protocol. For quantitative real-time PCR (qRT-PCR), RNA was reverse-transcribed using the High-Capacity cDNA Reverse Transcription Kit (Applied Biosystems) according to the manufacturer's instructions. The resulting cDNA was analyzed by qRT-PCR using the QuantiTect SYBR Green qPCR System (Qiagen). A QuantiTect Primer Assay for mouse Grb10 was used to amplify the target gene, while the β-acting primers (β-actin forward, ACCCAGATCATGTTTGAGACCT (SEQ ID NO: 25); and β-actin reverse, GCAGTAATCTCCTTCTGCATCC (SEQ ID NO: 26)) were used as a normalization control. All reactions were run on an ABI 7900HT Fast Real-Time PCR instrument with a 15 min hot start at 95° C. followed by 40 cycles of a 3-step thermocycling program: denaturation: 15 s at 94° C., annealing: 30 s at 55° C. and extension: 30 s at 70° C. Melting curve analysis was performed at the end of every run to ensure that a single PCR product of the expected melting temperature was produced in a given well. A total of 3 biological replicates×4 technical replicates/biological replicate were performed for each treatment group. Data analysis utilized the comparative Cₜ method (ΔΔCₜ method).

### Analysis of GRB10 and PTEN Expression in Human Samples.

[0205] Microarray expression data from six independent data sets corresponding to patient samples from bladder (GSE3167), glioblastoma (GSE4536), breast (GSE5764), myeloma (GSE5900), pancreatic (GSE1542) carcinoma and matching normal tissues were downloaded from Gene Expression Omnibus (www.nebi.nlm.nih.gov/geo/) and for prostate carcinoma from the Broad Institute cancer program datasets (www.broadinstitute.org/cgi-bin/cancer/datasets.cgi). The correlation in the gene expression between GRB10 and PTEN was performed using Pearson's correlation coefficient analysis and the samples were clustered using the Euclidean distance metric and Ward's linkage algorithm.

### REFERENCES

[0206] 1. X. M. Ma, J. Blenis, Nat Rev Mol Cell Biol 10, 307 (2009).
[0207] 2. D. R. Alessi, L. R. Pearce, J. M. Garcia-Martinez, Sci Signal 2, pe27 (2009).
[0208] 3. A. Y. Choo, J. Blenis, Cell Cycle 8, 567 (2009).
[0209] 4. T. F. Cloughesy et al., PLoS Med 5, e8 (2008).
[0210] 5. A. Carracedo et al., J Clin Invest 118, 3065 (2008).
[0211] 6. O. J. Shah, Z. Wang, T. Hunter, Curr Biol 14, 1650 (2004).
[0212] 7. D. J. Kwiatkowski, B. D. Manning, Hum Mol Genet. 14 Spec No. 2, R251 (2005).
[0213] 8. J. T. Murray et al., Biochem J 384, 477 (2004).
[0214] 9. H. H. Zhang, A. I. Lipovsky, C. C. Dibble, M. Sahin, B. D. Manning, Mol Cell 24, 185 (2006).
[0215] 10. W. Huang da, B. T. Sherman, R. A. Lempicki, Nat Protoc 4, 44 (2009).
[0216] 11. M. A. Lim, H. Riedel, F. Liu, Front Biosci 9, 387 (2004).
[0217] 12. A. Y. Choo, S. O. Yoon, S. G. Kim, P. P. Roux, J. Blenis, Proc Natl Acad Sci USA 105, 17414 (2008).
[0218] 13. P. Langlais et al., Biochemistry 44, 8890 (2005).
[0219] 14. D. A. Guertin, D. M. Sabatini, Sci Signal 2, pe24 (2009).
[0220] 15. M. Charalambous et al., Proc Natl Acad Sci USA 100, 8292 (2003).
[0221] 16. L. Wang et al., Mol Cell Biol 27, 6497 (2007).
[0222] 17. A. Tzatsos, K. V. Kandror, Mol Cell Biol 26, 63 (2006).
[0223] 18. A. Y. Choo et al., Mol Cell 38, 487 (2010).
[0224] 19. L. H. Saal et al., Cancer Res 65, 2554 (2005).
[0225] 20. R. T. Peterson, P. A. Beal, M. J. Comb, S. L. Schreiber, J Biol Chem 275, 7416 (2000).
[0226] 21. T. P. Herbert, A. R. Tee, C. G. Proud, J Biol Chem 277, 11591 (2002).
[0227] 22. E. Y. Chan, S. Kir, S. A. Tooze, J Biol Chem 282, 25464 (2007).
[0228] 23. N. Hosokawa et al., Mol Biol Cell 20, 1981 (2009).
[0229] 24. J. T. Murray, D. G. Campbell, M. Peggie, A. Mora, P. Cohen, Biochem J384, 489 (2004).
[0230] 25. J. M. Dyson et al., J Cell Biol 155, 1065 (2001).
[0231] 26. M. S. Woo, Y. Ohta, I. Rabinovitz, T. P. Stossel, J. Blenis, Mol Cell Biol 24, 3025 (2004).
[0232] 27. J. Villen, S. A. Beausoleil, S. A. Gerber, S. P. Gygi, Proc Natl Acad Sci USA 104, 1488 (2007).
[0233] 28. J. Rappsilber, Y. Ishihama, M. Mann, Anal Chem 75, 663 (2003).
[0234] 29. S. A. Beausoleil, J. Villen, S. A. Gerber, J. Rush, S. P. Gygi, Nat Biotechnol 24, 1285 (2006).
[0235] 30. N. Dephoure et al., Proc Natl Acad Sci USA 105, 10762 (2008).
[0236] 31. C. E. Bakalarski et al., J Proteome Res 7, 4756 (2008).

### INCORPORATION BY REFERENCE

[0237] All publications, patents and sequence database entries mentioned herein, including those items listed below and in the databases and tables provided or referred to herein, are hereby incorporated by reference in their entirety for disclosure of the relevant subject matter indicated, as if each individual database entry, publication, or patent was specifically and individually indicated to be incorporated by reference. The specification provides a number of International Protein Index (IPI) accession numbers, starting with IPI followed by a number. International Protein Index database entries identified by IPI accession number in the specification are incorporated by reference for disclosure of the respective protein sequence and accompanying protein information. The IPI database can be accessed at the European Bioinformatics Institute homepage (www.ebi.ac.uk/), for example, at (www.ebi.ac.uk/IPI/IPIhelp.html). In case of conflict, the present application, including any definitions herein, will control.

### EQUIVALENTS AND SCOPE

[0238] Those skilled in the art will recognize, or be able to ascertain using no more than routine experimentation, many equivalents to the specific embodiments of the invention described herein. The scope of the present invention is not intended to be limited to the above description, but rather is as set forth in the appended claims.

[0239] In the claims articles such as “a,” “an,” and “the” may mean one or more than one unless indicated to the contrary or otherwise evident from the context. Claims or descriptions that include “or” between one or more members of a group are considered satisfied if one, more than one, or all of the group members are present in, employed in, or otherwise relevant to a given product or process unless indicated to the contrary or otherwise evident from the context. The invention includes embodiments in which exactly one member of the group is present in, employed in, or otherwise relevant to a given product or process. The invention also includes embodiments in which more than one, or all of the group members are present in, employed in, or otherwise relevant to a given product or process. Furthermore, it is to be understood that the invention encompasses all variations, combinations, and permutations in which one or more limitations, elements, clauses, descriptive terms, etc., from one or more of the claims or from relevant portions of the description is introduced into another claim. For example, any claim that is dependent on another claim can be modified to include one or more limitations found in any other claim that is dependent on the same base claim. Furthermore, where the claims recite a composition, it is to be understood that methods of using the composition for any of the purposes disclosed herein are included, and methods of making the composition according to any of the methods of making disclosed herein or other methods known in the art are included, unless otherwise indicated or unless it would be evident to one of ordinary skill in the art that a contradiction or inconsistency would arise. For example, it is to be understood that any of the compositions of the invention can be used for vocal cord repair or other soft tissue repair or augmentation. It is also to be understood that any of the compositions made according to the methods for preparing compositions disclosed herein can be used for vocal cord repair or other soft tissue repair or augmentation. In addition, the invention encompasses compositions made according to any of the methods for preparing compositions disclosed herein.

[0240] Where elements are presented as lists, e.g., in Markush group format, it is to be understood that each subgroup of the elements is also disclosed, and any element(s) can be removed from the group. It is also noted that the term “comprising” is intended to be open and permits the inclusion of additional elements or steps. It should be understood that, in general, where the invention, or aspects of the invention, is/are referred to as comprising particular elements, features, steps, etc., certain embodiments of the invention or aspects of the invention consist, or consist essentially of, such elements, features, steps, etc. For purposes of simplicity those embodiments have not been specifically set forth in haec verba herein. Thus for each embodiment of the invention that comprises one or more elements, features, steps, etc., the invention also provides embodiments that consist or consist essentially of those elements, features, steps, etc.

[0241] Where ranges are given, endpoints are included. Furthermore, it is to be understood that unless otherwise indicated or otherwise evident from the context and/or the understanding of one of ordinary skill in the art, values that are expressed as ranges can assume any specific value within the stated ranges in different embodiments of the invention, to the tenth of the unit of the lower limit of the range, unless the context clearly dictates otherwise. It is also to be understood that unless otherwise indicated or otherwise evident from the context and/or the understanding of one of ordinary skill in the art, values expressed as ranges can assume any subrange within the given range, wherein the endpoints of the subrange are expressed to the same degree of accuracy as the tenth of the unit of the lower limit of the range.

[0242] In addition, it is to be understood that any particular embodiment of the present invention may be explicitly excluded from any one or more of the claims. Any embodiment, element, feature, application, or aspect of the compositions and/or methods of the invention, can be excluded from any one or more claims. For purposes of brevity, all of the embodiments in which one or more element, feature, purpose, or aspect is excluded are not set forth explicitly herein.

### TABLES

[0243] The Tables provided below are referred to in the specification and the claims. Because some of the tables are lengthy, they are provided in this subsection.

TABLE 1

| Gene Symbol | Annotation |
|---|---|
| 1110013L07Rik | Putative uncharacterized protein |
| 1600027N09Rik | RIKEN cDNA 1600027N09 gene |
| 2610110G12Rik | Isoform 1 of UPF0635 protein C6orf134 homolog |
| Aak1 | Isoform 2 of AP2-associated protein kinase 1 |
| Adamts2 | A disintegrin and metalloproteinase with thrombospondin motifs 2 |
| Ahctf1 | AT-hook-containing transcription factor 1 |
| Ahnak | AHNAK nucleoprotein isoform 1 |
| Aim1l | Absent in melanoma 1-like |
| Akt1s1 | Proline-rich AKT1 substrate 1 |
| Alkbh6 | 24 kDa protein |
| Arhgap17 | Isoform 1 of Rho GTPase-activating protein 17 |
| Atg2a | Autophagy-related protein 2 homolog A |
| B230208H17Rik | Putative GTP-binding protein Parf |
| Bat2l | Isoform 1 of Protein BAT2-like |
| Bcas3 | Isoform 1 of Breast carcinoma-amplified sequence 3 homolog |
| Bclaf1 | Isoform 2 of Bcl-2-associated transcription factor 1 |
| Bcr | Breakpoint cluster region protein |
| Bmp2k | Isoform 1 of BMP-2-inducible protein kinase |
| Bod1l | biorientation of chromosomes in cell division 1-like |
| C130092O11Rik | Isoform 1 of Uncharacterized protein KIAA1680 |
| Cabin1 | calcineurin binding protein 1 |
| Carhspl | Calcium-regulated heat stable protein 1 |
| Ccdc6 | coiled-coil domain containing 6 |
| Ccnl1 | Isoform 1 of Cyclin-L1 |
| Cd2ap | CD2-associated protein |
| Cdgap | Cdc42 GTPase-activating protein |
| Chd1 | Chromodomain-helicase-DNA-binding protein 1 |
| Crkrs | Isoform 2 of Cell division cycle 2-related protein kinase 7 |
| Cttn | Src substrate cortactin |
| Cux1 | cut-like homeobox 1 isoform a |
| D6Wsu116e | Isoform 1 of Protein FAM21 |
| D830015G02Rik | Putative uncharacterized protein |
| Dab2 | Isoform p93 of Disabled homolog 2 |
| Ddx21 | Nucleolar RNA helicase 2 |
| Dennd4a | hypothetical protein LOC102442 |
| Dhx15 | Putative pre-mRNA-splicing factor ATP-dependent RNA helicase DHX15 |
| Dnajc2 | DnaJ homolog subfamily C member 2 |
| Dock11 | Dedicator of cytokinesis protein 11 |
| Edc3 | Enhancer of mRNA-decapping protein 3 |
| Edc4 | Isoform 1 of Enhancer of mRNA-decapping protein 4 |
| Eef2k | Elongation factor 2 kinase |
| Ehbp1 | Isoform 2 of EH domain-binding protein 1 |
| Ehmt2 | Isoform 1 of Histone-lysine N-methyltransferase H3 lysine-9 specific 3 |
| Eif3a | Eukaryotic translation initiation factor 3 subunit A |
| Eif4b | Eukaryotic translation initiation factor 4B |
| Eif4ebp1 | Eukaryotic translation initiation factor 4E-binding protein 1 |
| Eif4ebp2 | Eukaryotic translation initiation factor 4E-binding protein 2 |
| Eif4g1 | Isoform 1 of Eukaryotic translation initiation factor 4 gamma 1 |
| Eif5; LOC100047658 | Eukaryotic translation initiation factor 5 |
| Emg1 | Probable ribosome biogenesis protein NEP1 |
| Eps8l2 | Isoform 1 of Epidermal growth factor receptor kinase substrate 8-like protein 2 |
| Epyc | Epiphycan |
| Erc1; LOC100048600 | Isoform 1 of ELKS/RAB6-interacting/CAST family member 1 |
| Ext1 | Exostosin-1 |
| Fbxw9 | F-box and WD-40 domain protein 9 |
| Fkbp15 | Isoform B of FK506-binding protein 15 |
| FLNA | Filamin-A |
| Fmnl3 | Isoform 1 of Formin-like protein 3 |
| Foxk1 | Forkhead box protein K1 |
| Foxk2 | Isoform 1 of Forkhead box protein K2 |
| Fxr1 | Isoform E of Fragile X mental retardation syndrome-related protein 1 |
| Gbf1 | Golgi-specific brefeldin A-resistance factor 1 |
| Gm13099 | Novel protein similar to preferentially expressed antigen in melanoma-like family |
| Gm13697 | Novel protein containing MIF4G and MA3 domains |
| Gm14085 | Novel protein similar to solute carrier family 28 (Sodium-coupled nucleoside |
| | transporter) member 2 |
| Gm6988 | similar to hCG1640785 |
| Gm9757 | Putative uncharacterized protein |
| Gon4l | RIKEN cDNA 5830417110 gene |
| Grb10 | Isoform 3 of Growth factor receptor-bound protein 10 |
| Gsk3b | Glycogen synthase kinase-3 beta |
| Gtf2f1 | General transcription factor IIF subunit 1 |
| Hdgfrp2 | Isoform 3 of Hepatoma-derived growth factor-related protein 2 |
| Herc1 | hect (homologous to the E6-AP (UBE3A) carboxyl terminus) domain and RCC1 |
| | (CHC1)-like domain (RLD) 1 |
| Hisppd1 | 140 kDa protein |
| Hn1l | Hematological and neurological expressed 1-like protein |
| Ibtk | Isoform 2 of Inhibitor of Bruton tyrosine kinase |
| Inf2 | Isoform 1 of Inverted formin-2 |
| Iqsec1 | IQ motif and Sec7 domain 1 isoform b |
| Irs2 | Insulin receptor substrate 2 |
| Iws1 | Isoform 1 of Protein IWS1 homolog |
| Junb | Transcription factor jun-B |
| Kdm3b | Isoform 2 of Lysine-specific demethylase 3B |
| Kdm6a | Isoform 1 of Lysine-specific demethylase 6A |
| Ktn1 | Isoform 1 of Kinectin |
| Larp1 | Isoform 1 of La-related protein 1 |
| Larp4 | Putative uncharacterized protein |
| Larp7 | Isoform 1 of La-related protein 7 |
| Ldhd | 22 kDa protein |
| Lin9 | lsoform 2 of Lin-9 homolog |
| Llgl1 | lethal giant larvae homolog 1 isoform 1 |
| LOC100048123; Akt2 | RAC-beta serine/threonine-protein kinase |
| LOC100048559; Sfrs1 | Isoform 1 of Splicing factor arginine/serine-rich 1 |
| Luc7l2 | Isoform 1 of Putative RNA-binding protein Luc7-like 2 |
| Macf1 | Isoform 3 of Microtubule-actin cross-linking factor 1 |
| Med1 | Isoform 4 of Mediator of RNA polymerase II transcription subunit 1 |
| Megf11 | Isoform 4 of Multiple epidermal growth factor-like domains 11 |
| Mett10d | Isoform 1 of Putative methyltransferase METT10D |
| Mib1 | E3 ubiquitin-protein ligase MIB1 |
| Micall1 | Isoform 1 of MICAL-like protein 1 |
| Mll2 | similar to myeloid/lymphoid or mixed-lineage leukemia 2 |
| Mllt4 | Isoform 3 of Afadin |
| Mogat1 | 2-acylglycerol O-acyltransferase 1 |
| Mtap1b | Microtubule-associated protein 1B |
| Mtor | Isoform 1 of FKBP12-rapamycin complex-associated protein |
| Myef2 | Isoform 2 of Myelin expression factor 2 |
| Myo5a | Myosin-Va |
| Nacc1 | Nucleus accumbens-associated protein 1 |
| Ndrg3 | Protein NDRG3 |
| Nfic | Isoform 1 of Nuclear factor 1 C-type |
| Npm1 | Nucleophosmin |
| Numa1 | Nuclear mitotic apparatus protein 1 |
| Palm | Isoform 1 of Paralemmin |
| Patl1 | Protein PAT1 homolog 1 |
| Pbx2 | Pre-B-cell leukemia transcription factor 2 |
| Pcbp1 | Poly(rC)-binding protein 1 |
| Pcbp2 | Isoform 1 of Poly(rC)-binding protein 2 |
| Pcm1 | Isoform 1 of Pericentriolar material 1 protein |
| Pdcd11 | Protein RRP5 homolog |
| Pds5b | Isoform 1 of Sister chromatid cohesion protein PDS5 homolog B |
| Peg3 | Isoform 1 of Paternally-expressed gene 3 protein |
| Pgrmc2 | Membrane-associated progesterone receptor component 2 |
| Phf3 | PHD finger protein 3 |
| Phldb1 | Isoform 2 of Pleckstrin homology-like domain family B member 1 |
| Phldb2 | lsoform 1 of Pleckstrin homology-like domain family B member 2 |
| Pi4k2a | Phosphatidylinositol 4-kinase type 2-alpha |
| Pkn2 | Isoform 1 of Serine/threonine-protein kinase N2 |
| Pla2g4a | Cytosolic phospholipase A2 |
| Plekhm1 | Pleckstrin homology domain-containing family M member 1 |
| Pom121 | Nuclear envelope pore membrane protein POM 121 |
| Ppfibp2 | Isoform 4 of Liprin-beta-2 |
| Ppp1r12a | MCG122391 isoform CRA_e |
| Prkd2 | Serine/threonine-protein kinase D2 |
| Ptk2 | Isoform 1 of Focal adhesion kinase 1 |
| Qsox2 | Isoform 3 of Sulfhydryl oxidase 2 |
| Rab1 | Ras-related protein Rab-1A |
| Ranbp10 | Ran-binding protein 10 |
| Ranbp9 | RAN binding protein 9 |
| Rb1 | Retinoblastoma-associated protein |
| Rfc1 | Rfc1 protein |
| Rictor | Isoform 1 of rapamycin-insensitive companion of mTOR |
| Rnf19b | IBR domain containing 3 |
| Rps6 | 29 kDa protein |
| Rps6kb1 | Isoform Alpha I of Ribosomal protein S6 kinase beta-1 |
| RsI1d1 | Putative uncharacterized protein |
| rsp6 | 29 kDa protein |
| Sap30 | Histone deacetylase complex subunit SAP30 |
| Sbno1 | Isoform 2 of Protein strawberry notch homolog 1 |
| Scrib | Isoform 1 of Protein LAP4 |
| Serbp1 | Isoform 1 of Plasminogen activator inhibitor 1 RNA-binding protein |
| Setd1a | SET domain containing 1A |
| Sfrs18 | splicing factor arginine/serine-rich 18 |
| Sfrs8 | splicing factor arginine/serine-rich 8 |
| Sgta | Isoform 1 of Small glutamine-rich tetratricopeptide repeat-containing protein alpha |
| Slc4a1ap | solute carrier family 4 (anion exchanger) member 1 adaptor protein |
| Smarca4 | Putative uncharacterized protein |
| Smarcad1 | Isoform 1 of SWI/SNF-related matrix-associated actin-dependent regulator of |
| | chromatin subfamily A containing DEAD/H box 1 |
| Smarcc2 | Isoform 2 of SWI/SNF complex subunit SMARCC2 |
| Snx17 | Sorting nexin-17 |
| Snx30 | Sorting nexin-30 |
| Sorbs3 | Vinexin |
| Spna2 | Isoform 2 of Spectrin alpha chain brain |
| Sqstm1 | Isoform 1 of Sequestosome-1 |
| Srpk2 | serine/arginine-rich protein-specific kinase 2 |
| Srrm1 | Isoform 2 of Serine/arginine repetitive matrix protein 1 |
| Srrm2 | Isoform 3 of Serine/arginine repetitive matrix protein 2 |
| St5 | Isoform 1 of Suppression of tumorigenicity 5 |
| Strn3 | Striatin-3 |
| Syap1 | Synapse-associated protein 1 |
| Tbc1d4 | 140 kDa protein |
| Tcfeb | Transcription factor EB |
| Tinf2 | Putative uncharacterized protein |
| Tjp2 | Tight junction protein ZO-2 |
| Tmem106b | Transmembrane protein 106B isoform CRA_b |
| Tmpo | Isoform Beta of Lamina-associated polypeptide 2 isoforms beta/delta/epsilon/gamma |
| Tnc | Isoform 1 of Tenascin |
| Tns1 | tensin 1 |
| Tox4 | TOX high mobility group box family member 4 |
| Trim28 | Isoform 1 of Transcription intermediary factor 1-beta |
| Trip10 | Isoform 3 of Cdc42-interacting protein 4 |
| Ubxn7 | UBX domain-containing protein 7 |
| Ulk1 | Putative uncharacterized protein |
| Usp24 | Isoform 1 of Ubiquitin carboxyl-terminal hydrolase 24 |
| Usp36 | Ubiquitin specific peptidase 36 |
| Uvrag | UV radiation resistance associated |
| Vwa5b1 | von Willebrand factor A domain-containing protein 5B1 |
| Wdr91 | WD repeat-containing protein 91 |
| Wnk1 | Serine/threonine-protein kinase WNK1 |
| Zc3h4 | Isoform 2 of Zinc finger CCCH domain-containing protein 4 |
| Zc3hc1 | Isoform 1 of Nuclear-interacting partner of ALK |
| Zeb2 | Zinc finger E-box-binding homeobox 2 |
| Zfp106 | Isoform 1 of Zinc finger protein 106 |
| Zfp516 | Zinc finger protein 516 |
| Znrf2 | E3 ubiquitin-protein ligase ZNRF2 |

Table 1. Names and annotations of proteins identified to harbor phosphopeptides whose intensities decrease after rapamycin treatment (rapamycin screen).
Note
that the rapamycin screen included two biological replicates. For the first replicate, the light cells were controls whereas the heavy cells were treated with rapamycin. For the second replicate experiment, the light cells were treated with rapamycin, and the heavy cells were controls. Table 1 includes all unique proteins identified in both replicates. Protein sequences and phosphorylation sites can be identified from the identifiers provided in the tables and database provided herein.

TABLE 2

| Gene Symbol | Annotation |
|---|---|
| Myo18a | Isoform 4 of Myosin-XVIIIa |
| Brd2 | Isoform 2 of Bromodomain-containing protein 2 |
| 6330577E15Rik | Uncharacterized protein C10orf78 homolog |
| Best3 | Bestrophin-3 |
| Larp1 | Isoform 1 of La-related protein 1 |
| Fam62c | Isoform 1 of Extended synaptotagmin-3 |
| Mdn1 | Midasin homolog |
| Rtn4 | Isoform 2 of Reticulon-4 |
| Pcdh24 | Pcdh24 protein |
| Synj1 | similar to mKIAA0910 protein |
| Zfp318 | zinc finger protein 318 isoform 1 |
| Akt1s1 | Proline-rich AKT1 substrate 1 |
| Alpk3 | myocyte induction differentiation originator |
| Zc3h14 | Isoform 2 of Zinc finger CCCH domain-containing |
| | protein 14 |
| Edc4 | Isoform 1 of Enhancer of mRNA-decapping |
| | protein 4 |
| Srrm2 | Isoform 3 of Serine/arginine repetitive matrix |
| | protein 2 |
| Kif20b | Isoform 1 of M-phase phosphoprotein 1 |
| 1110007A13Rik | UPF0557 protein C10orf119 homolog |
| Pi4k2a | Phosphatidylinositol 4-kinase type 2-alpha |
| Top2b | DNA topoisomerase 2-beta |
| BC021381 | Isoform 2 of Uncharacterized protein KIAA1931 |
| Bbx | Isoform 1 of HMG box transcription factor BBX |
| Vcl | Vinculin |
| Eif4ebp1 | Eukaryotic translation initiation factor 4E-binding |
| | protein 1 |
| Rrp15 | RRP15-like protein |
| D10Wsu102e | Uncharacterized protein C12orf45 homolog |
| Braf | Isoform 1 of B-Raf proto-oncogene serine/ |
| | threonine-protein kinase |
| Atg2b | Isoform 1 of Autophagy-related protein 2 |
| | homolog B |
| Npm1 | Nucleophosmin |
| Pcsk5 | proprotein convertase subtilisin/kexin type 5 |
| Mtap1b | Microtubule-associated protein 1B |
| Ercc6l | DNA excision repair protein ERCC-6-like |
| Serinc1 | Serine incorporator 1 |
| Klf3; LOC100046855 | Krueppel-like factor 3 |
| Smarca4 | Putative uncharacterized protein |
| Aak1 | Uncharacterized protein FLJ45252 homolog |
| Eif4ebp2 | Eukaryotic translation initiation factor 4E-binding |
| | protein 2 |
| Ndrg1 | Protein NDRG1 |
| Melk | Maternal embryonic leucine zipper kinase |
| Arhgef17 | Isoform 1 of Rho guanine nucleotide exchange |
| | factor 17 |
| Grit | Isoform 2 of Rho/Cdc42/Rac GTPase-activating |
| | protein RICS |
| Mdc1 | mediator of DNA damage checkpoint 1 |
| Nfkb2 | NF-kB2 splice variant 4 |
| Pcm1 | Isoform 1 of Pericentriolar material 1 protein |
| Mybbp1a | Myb-binding protein 1A |
| Sf3b1 | Splicing factor 3B subunit 1 |
| Atrx | Transcriptional regulator ATRX |
| Ccdc88a | Isoform 2 of Girdin |
| Baz1b | Isoform 1 of Tyrosine-protein kinase BAZ1B |
| Nedd4l | Isoform 3 of E3 ubiquitin-protein ligase NEDD4- |
| | like |
| Orc6l | Origin recognition complex subunit 6 |
| Trp53bp1 | Transformation related protein 53 binding protein 1 |
| Map3k2 | Mitogen-activated protein kinase kinase kinase 2 |
| Hectd2 | Hectd2 protein |
| Usp10 | Ubiquitin carboxyl-terminal hydrolase 10 |
| D830031N03Rik | similar to mKIAA0754 protein |
| Nck1 | non-catalytic region of tyrosine kinase adaptor |
| | protein 1 |
| Exosc9 | Exosome complex exonuclease RRP45 |
| Dap | Death-associated protein 1 |
| Rps6kb1 | Isoform Alpha I of Ribosomal protein S6 kinase |
| | beta-1 |
| Lmna | Isoform C2 of Lamin-A/C |
| Sltm | Isoform 1 of SAFB-like transcription modulator |
| Sh3pxd2a | Isoform 1 of SH3 and PX domain-containing |
| | protein 2A |
| Flnc | Isoform 1 of Filamin-C |
| Oxr1 | Isoform 2 of Oxidation resistance protein 1 |
| Rin2 | Isoform 1 of Ras and Rab interactor 2 |
| Nek9 | Serine/threonine-protein kinase Nek9 |
| Pebp1 | Phosphatidylethanolamine-binding protein 1 |
| Pop1 | Processing of 1 ribonuclease P/MRP family |
| Serhl | Serine hydrolase-like protein |
| Epb4.1l3 | Isoform 1 of Band 4.1-like protein 3 |
| Hnrpll | Isoform 1 of Heterogeneous nuclear |
| | ribonucleoprotein L-like |
| Samhd1 | SAM domain and HD domain-containing protein 1 |
| Zfp828 | Zinc finger protein 828 |
| Larp7 | Isoform 1 of La-related protein 7 |
| Myc | myc proto-oncogene protein |
| Myo9a | Isoform 2 of Myosin-IXa |
| Gsk3b | Glycogen synthase kinase-3 beta |
| Zfp395 | zinc finger protein 395 |
| Bend3 | BEN domain-containing protein 3 |
| Akap12 | Isoform 1 of A-kinase anchor protein 12 |
| Eif4g1 | Isoform 1 of Eukaryotic translation initiation factor |
| | 4 gamma 1 |
| Eif4b | Eukaryotic translation initiation factor 4B |
| Dock7 | Isoform 2 of Dedicator of cytokinesis protein 7 |
| Patl1 | Protein PAT1 homolog 1 |
| Slc7a11 | Cystine/glutamate transporter |
| Myo9b | Isoform 1 of Myosin-IXb |
| Setd2 | SET domain containing 2 |
| Gphn | Gephyrin |
| Erf | ETS domain-containing transcription factor ERF |
| Spnb2 | Isoform 2 of Spectrin beta chain brain 1 |
| Phip | PH-interacting protein |
| Sdpr | Serum deprivation-response protein |
| Tcof1 | Treacle protein |
| Pwp1 | Periodic tryptophan protein 1 homolog |
| Rbl1 | Isoform Long of Retinoblastoma-like protein 1 |
| Eef1b2 | Elongation factor 1-beta |
| Phactr4 | Isoform 1 of Phosphatase and actin regulator 4 |
| C230081A13Rik | Tyrosine-protein kinase-protein kinase SgK269 |
| Ahnak2 | Putative uncharacterized protein |

Table 2. Names and annotations of proteins identified to harbor phosphopeptides whose intensities decrease after Ku-0063794 treatment (Ku-0063794 screen).
Note
that the light cells were treated with rapamycin and serve as controls whereas the heavy cells were treated with a combination of rapamycin and Ku-0063794. Protein sequences and phosphorylation sites can be identified from the identifiers provided in the tables and the database provided herein.

TABLE 3

| | | SEQ | | |
|---|---|---|---|---|
| | | ID | Gene | |
| IPI Reference | Peptide | NO | Name | Class |
| IPI00121418.1 | K.DGEGPDNLEPACPLSLPLQGNHTAADMYLS*PLRS*PK.K | 30 | Rb1 | 1 |
| IPI00221581.1 | R.TGS*ESS*QTGASATSGR.N | 31 | Eif4b | 1 |
| IPI00929786.1 | R.TAS*ISSS*PSEGTPAVGSYGCT*PQS*LPK@.F | 32 | Larp1 | 1 |
| IPI00929786.1 | R.TAS*ISSS*PSEGTPAVGSYGCT*PQS*LPK@.F | 33 | Larp1 | 1 |
| IPI00929786.1 | R.T*AS*ISSSPSEGTPAVGS*YGCTPQSLPK@.F | 34 | Larp1 | 1 |
| IPI00317401.6 | R.AES*PETSAVESTQST*PQK@.G | 35 | Pds5b | 1 |
| IPI00107958.1 | K.TSDIFGS*PVTATAPLAHPNK@PK@.D | 36 | Hn1l | 1 |
| IPI00108454.2 | R.R\hat{ }LS*S*LR\hat{ }.A | 37 | Rps6 | 1 |
| IPI00225062.2 | R.R\hat{ }SS*SELS*PEVVEK@.V | 38 | Srrm2 | 1 |
| IPI00761759.1 | R.S*SSGS*EHST*EGSVSLGDGPLSR\hat{ }.S | 39 | Larp4 | 1 |
| IPI00761759.1 | R.SSS*GS*EHST*EGSVSLGDGPLSR\hat{ }.S | 40 | Larp4 | 1 |
| IPI00225062.2 | R.RSS*SELS*PEVVEK.V | 41 | Srrm2 | 1 |
| IPI00122594.4 | R.TTPLAS*PSLS*PGR\hat{ }.S | 42 | Ahctf1 | 1 |
| IPI00136107.1 | R.THS*TSS*S*IGSGESPFSR\hat{ }.S | 43 | Ndrg3 | 1 |
| IPI00136107.1 | R.THS*TSSS*IGSGESPFSR\hat{ }.S | 44 | Ndrg3 | 1 |
| IPI00136107.1 | R.THS*TSS*SIGSGESPFSR\hat{ }.S | 45 | Ndrg3 | 1 |
| IPI00136107.1 | R.THS*TSSSIGSGESPFSR\hat{ }.S | 46 | Ndrg3 | 1 |
| IPI00136107.1 | R.T*HST*S*SSIGSGESPFSR\hat{ }.S | 47 | Ndrg3 | 1 |
| IPI00136107.1 | R.T*HSTSSS*IGSGESPFSR\hat{ }.S | 48 | Ndrg3 | 1 |
| IPI00136107.1 | R.THS*TSSS*IGSGESPFSR\hat{ }.S | 49 | Ndrg3 | 1 |
| IPI00136107.1 | R.T*HSTSS*SIGSGESPFSR\hat{ }.S | 50 | Ndrg3 | 1 |
| IPI00136107.1 | R.THS*TSSSIGSGESPFSR\hat{ }.S | 51 | Ndrg3 | 1 |
| IPI00551454.3 | R.ER\hat{ }QES*ESEQELVNK@.R | 52 | Pdcd11 | 1 |
| IPI00117229.3 | R.TS*PAGGTWSSVVSGVPR.L | 53 | Atxn2 | 1 |
| IPI00348442.1 | R.SK@FDS*DEEDEDAENLEAVSSGK@.V | 54 | Sfrs18 | 1 |
| IPI00556837.1 | K.DTVIIVS*EPS*EDEESHDLPSVTR.R | 55 | Smarcad1 | 1 |
| IPI00153986.2 | K.GTS*RPGT*PSAEAASTSSTLR.A | 56 | Gtf2f1 | 1 |
| IPI00225062.2 | R.GCS*PPKS*PEKPPQSTSSESCPPS*PQPTK.V | 57 | Srrm2 | 1 |
| IPI00128904.1 | R.VMTIPYQPMPASS*PVICAGGQDR.C | 58 | Pcbp1 | 1 |
| IPI00121251.7 | R.LSTTPS*PT*NSLHEDGVDDFRR.Q | 59 | Tox4 | 1 |
| IPI00320594.5 | K.SQPHSSTSNQETS*DS*EMEMEAEHYPNGVLESVSTR\hat{ }.I | 60 | Ranbp10 | 1 |
| IPI00808277.2 | R.SAPASPNHAGVLS*AHS*SGAQTPESLS*R\hat{ }.E | 61 | Foxk2 | 1 |
| IPI00137166.1 | R.SR\hat{ }DAT*PPVS*PINMEDQER\hat{ }.I | 62 | Junb | 1 |
| IPI00454104.1 | K.TTEAPCS*PGSQQPPS*PDELPANVK@.Q | 63 | Scrib | 1 |
| IPI00225062.2 | R.GCS*PPK@S*PEK@PPQSTSSESCPPS*PQPTK@.V | 64 | Srrm2 | 1 |
| IPI00153986.2 | K.GTS*R\hat{ }PGTPS*AEAASTSSTLR\hat{ }.A | 65 | Gtf2f1 | 1 |
| IPI00753321.2 | K.SVS*ETSEDK@K@DEES*DEEEEEEEEEEPLGATTR\hat{ }.S | 66 | Bod1l | 1 |
| IPI00153986.2 | K.GT*SR\hat{ }PGT*PSAEAASTSSTLR\hat{ }.A | 67 | Gtf2f1 | 1 |
| IPI00153986.2 | K.GTS*R\hat{ }PGT*PSAEAASTSSTLR\hat{ }.A | 68 | Gtf2f1 | 1 |
| IPI00929786.1 | R.TASIS*SSPS*EGTPAVGSYGCT*PQSLPK@.F | 69 | Larp1 | 1 |
| IPI00929786.1 | R.TASISS*SPSEGT*PAVGSYGCT*PQS*LPK@.F | 70 | Larp1 | 1 |
| IPI00130920.1 | R.RSES*PFECK.N | 71 | Mtap1b | 1 |
| IPI00336973.2 | K.GLNLDGTPALSTLGGFS*PASK@PSS*PR\hat{ }.E | 72 | Ccnl1 | 1 |
| IPI00336973.2 | K.GLNLDGTPALSTLGGFSPAS*KPS*SPR.E | 73 | Ccnl1 | 1 |
| IPI00336973.2 | K.GLNLDGT*PALSTLGGFSPAS*K@PS*SPR\hat{ }.E | 74 | Ccnl1 | 1 |
| IPI00336973.2 | K.GLNLDGTPALSTLGGFSPAS*K@PS*SPR\hat{ }.E | 75 | Ccnl1 | 1 |
| IPI00379844.4 | R.TAS*EGDGGAAGGAGTAGGR\hat{ }PMSVAGS*PLS*PGPVR\hat{ }.A | 76 | Irs2 | 1 |
| IPI00336973.2 | K.GLNLDGTPALSTLGGFSPAS*KPSS*PR.E | 77 | Ccnl1 | 1 |
| IPI00336973.2 | K.GLNLDGT*PALSTLGGFSPAS*KPSS*PR.E | 78 | Ccnl1 | 1 |
| IPI00656285.2 | R.SLVS*PIPSPT*GTISVPNSCPAS*PR\hat{ }.G | 79 | Foxk1 | 1 |
| IPI00656285.2 | R.SLVS*PIPS*PTGTISVPNSCPAS*PR.G | 80 | Foxk1 | 1 |
| IPI00454104.1 | K.TTEAPCS*PGSQQPPS*PDELPANVK@.Q | 81 | Scrib | 1 |
| IPI00753321.2 | K.S*VSETSEDK@K@DEES*DEEEEEEEEEEPLGATTR\hat{ }.S | 82 | Bod1l | 1 |
| IPI00753321.2 | K.SVS*ETSEDK@K@DEES*DEEEEEEEEEEPLGATTR\hat{ }.S | 83 | Bod1l | 1 |
| IPI00313307.3 | R.SYQNS*PSS*EDGIR\hat{ }PLPEYSTEK@.H | 84 | Med1 | 1 |
| IPI00225062.2 | R.GCS*PPK@S*PEK@PPQSTSS*ESCPPSPQPTK@.V | 85 | Srrm2 | 1 |
| IPI00318938.6 | R.NS*PVAK@TPPK@DLPAIPGVTS*PTSDEPPMQASQSQL | 86 | Eif4ebp1 | 1 |
| | PSSPEDK@.R | | | |
| IPI00130920.1 | R.SLMS*SPEDLTK@DFEELK@AEEIDVAK@.D | 87 | Mtap1b | 1 |
| IPI00553798.2 | R.SS*EVVLS*GDDEDYQR\hat{ }.I | 88 | Ahnak | 1 |
| IPI00129264.1 | R.ATSR\hat{ }PINLGPSS*PNTEIHWTPYR\hat{ }.A | 89 | Sorbs3 | 1 |
| IPI00129264.1 | R.ATSRPINLGPS*SPNTEIHWTPYR.A | 90 | Sorbs3 | 1 |
| IPI00123410.5 | R.TIS*AQDTLAYATALLNEK@.E | 91 | Usp24 | 1 |
| IPI00226441.2 | R.LHYT*PPLQS*PIT*DGDPLLGQS*PWR\hat{ }.S | 92 | Lin9 | 1 |
| IPI00309059.7 | R.ST*SPIIGS*PPVR\hat{ }.A | 93 | Patl1 | 1 |
| IPI00336713.1 | R.CS*PVPGLSSS*PSGSPLHGK@.L | 94 | Bcas3 | 1 |
| IPI00320905.7 | R.LGEQGPEPGPT*PPQTPT*PPS*TPPLAK.Q | 95 | Arhgap17 | 1 |
| IPI00309059.7 | R.R\hat{ }S*TS*PIIGS*PPVR\hat{ }.A | 96 | Patl1 | 1 |
| IPI00309059.7 | R.RSTS*PIIGS*PPVR.A | 97 | Patl1 | 1 |
| IPI00309059.7 | R.ST*S*PIIGS*PPVR\hat{ }.A | 98 | Patl1 | 1 |
| IPI00317599.3 | K.SQEDEEEISTS*PGVSEFVSDAFDTCSLNQEDLRK.E | 99 | Syap1 | 1 |
| IPI00317599.3 | K.SQEDEEEIST*SPGVSEFVSDAFDTCSLNQEDLRK.E | 100 | Syap1 | 1 |
| IPI00656285.2 | R.S*LVSPIPSPT*GTISVPNS*CPASPR\hat{ }.G | 101 | Foxk1 | 1 |
| IPI00676574.2 | R.RVS*TDLPEGQDVYTAACNSVIHR.C | 102 | Herc1 | 1 |
| IPI00458958.2 | K.DWDK@ES*EGEEPAGGR\hat{ }.A | 103 | Rrp15 | 2 |
| IPI00230719.8 | R.R\hat{ }DSS*DDWEIPDGQITVGQR\hat{ }.I | 104 | Braf | 2 |
| IPI00318938.6 | R.VALGDGVQLPPGDYSTT*PGGTLFSTTPGGT*R.I | 105 | Eif4ebp1 | 2 |
| IPI00874995.2 | R.AS*DDLGEPDVFATAPFR.S | 106 | Aak1 | 2 |
| IPI00318938.6 | R.VALGDGVQLPPGDYSTT*PGGTLFSTTPGGT*R\hat{ }.I | 107 | Eif4ebp1 | 2 |
| IPI00318938.6 | R.VALGDGVQLPPGDYSTTPGGT*LFSTT*PGGTR.I | 108 | Eif4ebp1 | 2 |
| IPI00318938.6 | R.VALGDGVQLPPGDYSTTPGGT*LFSTT*PGGTR\hat{ }.I | 109 | Eif4ebp1 | 2 |
| IPI00323045.3 | R.S*MDVDLNQAHMEDTPK@.K | 110 | Melk | 2 |
| IPI00623284.4 | K.IWDPTPSHT*PAGAAT*PGRGDT*PGHAT*PGHGGATSSA | 111 | Sf3b1 | 2 |
| | R.K | | | |
| IPI00125960.1 | R.TAS*GSS*VTSLEGTR.S | 112 | Ndrg1 | 2 |
| IPI00318938.6 | R.R\hat{ }VALGDGVQLPPGDYSTT*PGGTLFSTT*PGGTR\hat{ }.I | 113 | Eif4ebp1 | 2 |
| IPI00229571.1 | R.ISS*K@S*PGHMVILNQTK@.G | 114 | Sltm | 2 |
| IPI00120095.2 | R.DFTK@PQDGDIIAPLIT*PLK@.W | 115 | Samhd1 | 2 |
| IPI00340860.5 | R.T*AS*EGSEAETPEAPK.Q | 116 | Larp7 | 2 |
| IPI00664670.4 | R.LGS*FGSITR\hat{ }.Q | 117 | Flnc | 2 |
| IPI00654192.2 | R.S*LSFSEPQQPPPTVK@.S | 118 | Zfp395 | 2 |
| IPI00225062.2 | K.IHTTALTGQSPPLAS*GHQGEGDAPSVEPGATNIQQPSS* | 119 | Srrm2 | 2 |
| | PAPSTK.Q | | | |
| IPI00225062.2 | K.IHTTALTGQS*PPLASGHQGEGDAPSVEPGATNIQQPSS* | 120 | Srrm2 | 2 |
| | PAPST*K@.Q | | | |
| IPI00225062.2 | K.IHTTALTGQS*PPLASGHQGEGDAPSVEPGATNIQQPSS* | 121 | Srrm2 | 2 |
| | PAPST*K.Q | | | |
| IPI00339428.9 | R.MSSHTETS*SFLQTLTGR.L | 122 | Dock7 | 2 |
| IPI00225062.2 | R.DGSGT*PSRHSLS*GS*S*PGMKDTPQT*PSR.G | 123 | Srrm2 | 2 |
| IPI00668709.2 | R.DRS*SSAPNVHINTIEPVNIDDLIR.D | 124 | Braf | 2 |
| IPI00135660.5 | R.RGNNS*AVGS*NADLT*IEEDEEEEPVALQQAQQVR.Y | 125 | Sdpr | 2 |
| IPI00135660.5 | R.R\hat{ }GNNSAVGS*NADLT*IEEDEEEEPVALQQAQQVR\hat{ }.Y | 126 | Sdpr | 2 |
| IPI00404545.2 | R.SLS*S*PTVTLSAPLEGAK@.D | 127 | Nedd4l | 2 |
| IPI00121892.9 | R.R\hat{ }PPS*PDPNTK@.V | 128 | Spnb2 | 2 |
| IPI00322707.5 | K.AKQPVIGDQNSDS*DEMLAVLK.E | 129 | Atrx | 2 |
| IPI00929786.1 | R.S*LPTTVPES*PNYR\hat{ }.N | 130 | Larp1 | 3 |
| IPI00125319.1 | R.TTS*FAESCK@PVQQPSAFGSMK@.V | 131 | Gsk3b | 3 |

Table 3. Categorization of mTOR targets identified in the rapamycin and Ku-0063794 screens. Class 1 includes downstream effectors of rapamycin-sensitive mTORC1. Class 2 includes downstream effectors of rapamycin-insensitive mTORC1 or mTORC2. Class 3 includes the proteins downstream of both mTORC1 and mTORC2. Name of exemplary genes and sequences of respective phosphopeptides are shown.
*represents the site of phosphorylation (Ser, Thr and Tyr);
\hat{ }and @ represent heavy Arg and Lys, respectively.

TABLE 4

| | |
|---|---|
| Extracted Term | IPI References |

Rapamycin screen

| | |
|---|---|
| mTOR signaling pathway | IPI00453603, IPI00318938, IPI00399440, IPI00268673, IPI00467843, IPI00221581, IPI00121335 |
| ErbB signaling pathway | IPI00125319, IPI00453603, IPI00318938, IPI00113563, IPI00268673, IPI00121335 |
| Insulin signaling pathway | IPI00125319, IPI00453603, IPI00116923, IPI00318938, IPI00268673, IPI00379844, IPI00121335 |
| Acute myeloid leukemia | IPI00453603, IPI00318938, IPI00268673, IPI00121335 |
| Focal adhesion | IPI00403938, IPI00125319, IPI00131138, IPI00113563, IPI00671847, IPI00121335 |
| Tight junction | IPI00118143, IPI00380354, IPI00323349, IPI00845596, IPI00121335 |
| Pathways in cancer | IPI00125319, IPI00121418, IPI00381495, IPI00113563, IPI00268673, IPI00380817, IPI00121335 |
| Prostate cancer | IPI00125319, IPI00121418, IPI00268673, IPI00121335 |
| RNA degradation | IPI00169888, IPI00309059, IPI00330066 |
| Glioma | IPI00121418, IPI00268673, IPI00121335 |
| Adipocytokine signaling pathway | IPI00268673, IPI00379844, IPI00121335 |
| VEGF signaling pathway | IPI00111169, IPI00113563, IPI00121335 |
| Chronic myeloid leukemia | IPI00121418, IPI00380817, IPI00121335 |

Ku-0063794 Screen

| | |
|---|---|
| Erb6 signaling pathway | IPI00453999, IPI00125319, IPI00453603, IPI00230719, IPI00318938, IPI00668709, IPI00131999 |
| mTOR signaling pathway | IPI00453603, IPI00230719, IPI00318938, IPI00668709, IPI00221581 |
| Acute myeloid leukemia | IPI00453603, IPI00230719, IPI00318938, IPI00668709, IPI00131999 |
| Cell cycle | IPI00125319, IPI00124717, IPI00137864, IPI00131999 |
| Insulin signaling pathway | IPI00125319, IPI00453603, IPI00230719, IPI00318938, IPI00668709 |
| Endometrial cancer | IPI00125319, IPI00230719, IPI00668709, IPI00131999 |
| MAPK signaling pathway | IPI00230719, IPI00117088, IPI00123474, IPI00668709, IPI00664670, IPI00131999 |
| RNA degradation | IPI00309059, IPI00119442, IPI00330066 |
| Focal adhesion | IPI00125319, IPI00230719, IPI00405227, IPI00668709, IPI00664670 |
| Colorectal cancer | IPI00125319, IPI00230719, IPI00668709, IPI00131999 |
| TGF-beta signaling pathway | IPI00453603, IPI00137864, IPI00131999 |

Table 4. Gene ontology analysis of mTOR targets identified in the rapamycin and Ku-0063794 screens. Pathways that were overrepresented among the rapamycin-sensitive and Ku-sensitive mTOR targets are shown. Also shown is the biological process that the rapamycin-sensitive and Ku-sensitive targets overrepresented.

TABLE 5
Summary of the data. Two biological replicates were obtained for the rapamycin
screen (each contained data from two technical replicates) and one SILAC experiment was
performed for the Ku-0063794 screen. (L), light cells. (H), heavy cells.

| | | | | | # of | # of | # of | | Total |
|---|---|---|---|---|---|---|---|---|---|
| | Bio- | # of tech- | | | phospho- | phospho- | unique | Total | phospho- |
| Screen | repli- | replicate | Cell | Drug | peptides | proteins | phospho- | unique | proteins |
| ID | cate | combined | line | treatment | (FDR %) | (FDR %) | sites | sites | (FDR %) |
| Rapa | #1 | 2 | TSC2-/- | (L) DMSO | 14,635 | 1,615 | 4,484 | | |
| | | | | (H) rapa | (0.25%) | (1.0%) | | | |
| | #2 | 2 | TSC2-/- | (L) rapa | 32,500 | 1,866 | 6,832 | 11,271 | 2,778 |
| | | | | (H) DMSO | (0.28%) | (0.97%) | | | (1.7%) |
| Ku | #1 | 1 | wt MEF | (L) rapa | 34,642 | 1,867 | 6,220 | | |
| | | | | (H) rapa+Ku | (0.28%) | (0.97%) | | | |

TABLE 6

| | | | | | |
|---|---|---|---|---|---|
| Gene | | | SEQ | Amino acid | Median |
| Name | Description | Modified Sequence | ID NO | position | (treated/ctrl) |

Rapa Screen (Proteins with downregulated phosphorylation)

| | | | | | |
|---|---|---|---|---|---|
| RPS6 | Ribosomal protein S6 | RLS*S*LRASTSK | 132 | S235, S236 | 30.5 |
| RPS6 | Ribosomal protein S6 | LSSLRAS*TS*KSES*S*QK | 133 | S240, S242, | 4.5 |
| | | | | S246, S247 | |
| Akt1s1 | Proline-rich AKT1 substrate 1 | S*LPVSVPVWAFK | 134 | S184 | 2.2 |
| Gsk3β | Glycogen synthase kinase-3 | TTS*FAESCKPVQQPSAFGSMK | 135 | S9 | 3.3 |
| | beta | | | | |
| Eif4ebp2 | Eukaryotic translation initiation | RNS*PMAQT*PPCHLPNIPGVT | 136 | S65, T70 | 39.1 |
| | factor 4E-binding protein 2 | SPGALIEDSK | | | |
| Eif4ebp2 | Eukaryotic translation initiation | TVAISDAAQLPDYCTT*PGGT | 137 | T37, T46 | 2.3 |
| | factor 4E-binding protein 2 | LFSTT*PGGTRIIYDRK | | | |
| Eif4b | Eukaryotic translation initiation | SRT*GS*ESSQTGASATSGR | 138 | T420, S422 | 4.3 |
| | factor 4B | | | | |
| Eif4b | Eukaryotic translation initiation | TGS*ESS*QTGASATSGR | 139 | S422, S425 | 4.6 |
| | factor 4B | | | | |
| Eif4ebp1 | Eukaryotic translation initiation | NS*PVAKT*PPKDLPAIPGVTSP | 140 | S64, T69 | 2.8 |
| | factor 4E-binding protein 1 | TSDEPPMQASQSQLPSSPEDK | | | |
| Eif4g1 | Isoform 1 of Eukaryotic | SFS*KEVEER | 141 | S1189 | 2.8 |
| | translation initiation factor 4 | | | | |
| | gamma 1 | | | | |
| Rps6kb1 | Isoform Alpha I of Ribosomal | FIGS*PRT*PVS*PVKFSPGDFW | 142 | S441, T444, | 2.8 |
| | protein S6 kinase beta-1 | GR | | S447 | |
| mTOR | Isoform 1 of FKBP12- | AGTTVPES*IHS*FIGDGLVKPE | 143 | S2478, | 3.6 |
| | rapamycin complex- | ALNKK | | S2481 | |
| | associated protein | | | | |
| ULK1 | Serine/threonine-protein | GGGASS*PAPVVFTVGS*PPSG | 144 | S747, S757, | 4.1 |
| | kinase ULK1 | AT*PPQSTR | | T763 | |
| Grb10 | Isoform 3 of Growth factor | MNILSS*QS*PLHPSTLNAVIHR | 145 | S421, S423 | 27.3 |
| | receptor-bound protein 10 | | | | |
| Grb10 | Isoform 3 of Growth factor | T*ASLPAIPNPFPELTGAAPGS* | 146 | T76, S96, | 5.4 |
| | receptor-bound protein 10 | PPSVAPSS*LPPPPSQPPAK | | S104 | |

Ku Screen (Proteins with downregulated phosphorylation)

| | | | | | |
|---|---|---|---|---|---|
| Flnc | Filamin-C | LGS*FGSITR | 147 | S2234 | 2.4 |
| Gsk3β | Glycogen synthase kinase-3 | TTS*FAESCKPVQQPSAFGSMK | 148 | S9 | 2.2 |
| | beta | | | | |
| Ndrg1 | Protein NDRG1 | TAS*GSS*VTSLEGTR | 149 | S330, S333 | 4.1 |
| Braf | B-Raf protein | DRSSS*APNVHINTIEPVNIDDLIR | 150 | S312 | 2.1 |
| Akt1s1 | Proline-rich AKT1 substrate 1 | LNT*SDFQK | 151 | T247 | 31.3 |
| Eif4b | Eukaryotic translation initiation | TGS*ESSQTGASATSGR | 152 | S422 | 2.2 |
| | factor 4B | | | | |
| Eif4ebp1 | Eukaryotic translation initiation | VALGDGVQLPPGDYSTT*PGGT | 153 | T36, T45 | 7.2 |
| | factor 4E-binding protein 1 | LFSTT*PGGTR | | | |
| Eif4ebp2 | Eukaryotic translation initiation | NS*PMAQTPPCHLPNIPGVTSP | 154 | S65 | 6.8 |
| | factor 4E-bindg protein 2 | GALIEDSK | | | |

Table 6. Representative hits identified in the rapamycin and Ku-0063794 screens. Only protein targets with downregulated phosphorylation are shown. Median fold-changes of the identified phosphopeptides are reported. For the rapamycin screen, hits from the second biological replicate are shown. The control group is DMSO vehicle treated sample whereas the experiment group is the one treated with rapamycin. For the Ku-0063794 screen, the control group was treated with rapamycin whereas the experiment group was treated with a combination of rapamycin and Ku-0063794. An asterisk indicates the site of phosphorylation. Phosphorylation of Grb10 in MNILSS*QS*PLHPSTLNAVIHR (SEQ ID NO: 27) corresponds to S421/S423 in isoform 3 and S501/S503 in isoform 1, respectively. The site designation in the text corresponds to the sites in isoform 1 (mouse sequence).

TABLE 7

| | | | | | |
|---|---|---|---|---|---|
| | | | | | Log2 |
| | | SEQ | | | Area |
| | | ID | Gene | | (H/L) |
| Reference | Ascore Seq | NO: | Name | Annotation | Ratio |

Rapa replicate 1 (light cells were control and heavy cells were treated
with rapamycin. L, light; H, heavy)

| | | | | | |
|---|---|---|---|---|---|
| IPI:IPI00136419.1 | LDGNPINLS*R | 155 | Epyc | Epiphycan | −7.993 |
| IPI:IPI00108454.2 | LSS*LRAS*TSKSESSQK | 156 | rpS6 | 29 kDa protein | −7.693 |
| IPI:IPI00108454.2 | RLS*S*LRASTSK | 157 | rpS6 | 29 kDa protein | −6.817 |
| IPI:IPI00225062.2 | TPQAPTPANLVVGPR\hat{ }S*A | 158 | Srrm2 | Isoform 3 of Serine/arginine repetitive | −6.606 |
| | HGT*APVNIAGS*R\hat{ } | | | matrix protein 2 | |
| IPI:IPI00111497.1 | VTEGSYSCLAHS*PLGVVA | 159 | Igdcc4 | Isoform 2 of Immunoglobulin | −6.062 |
| | SQVAVVK | | | superfamily DCC subclass member 4 | |
| IPI:IPI00874813.1 | MPAT*DTANLTAPWHPR | 160 | Ldhd | 22 kDa protein | −5.745 |
| IPI:IPI00126317.1 | NAS*TS*FQELEDKK | 161 | Dnajc2 | DnaJ homolog subfamily C member 2 | −5.522 |
| IPI:IPI00187443.1 | WLKEAEEES*S*GGEEEDE | 162 | Eif5; | Eukaryotic translation initiation | −5.378 |
| | DENIEVVYSK | | LOC100047658 | factor 5 | |
| IPI:IPI00318938.6 | RVALGDGVQLPPGDYSTT* | 163 | Eif4ebp1 | Eukaryotic translation initiation | −5.301 |
| | PGGTLFS*TTPGGTR | | | factor 4E-binding protein 1 | |
| IPI:IPI00225062.2 | S*AHGT*APVNIAGSRTPAG | 164 | Srrm2 | Isoform 3 of Serine/arginine repetitive | −5.098 |
| | LAPTNLS*SSR | | | matrix protein 2 | |
| IPI:IPI00467423.3 | GYS*YDDSMESR | 165 | Gm13697 | Novel protein containing MIF4G and | −5.093 |
| | | | | MA3 domains | |
| IPI:IPI00467423.3 | GYS*YDDSMESR | 166 | Gm13697 | Novel protein containing MIF4G and | −4.733 |
| | | | | MA3 domains | |
| IPI:IPI00130920.1 | SDISPLT*PR | 167 | Mtap1b | Microtubule-associated protein 1B | −4.668 |
| IPI:IPI00133685.1 | AATATRPPGPPPAPQPPS* | 168 | Akt1s1 | Proline-rich AKT1 substrate 1 | −4.667 |
| | PAPS*PPPRPALAR | | | | |
| IPI:IPI00154084.2 | GFGDS*FGR | 169 | Myef2 | Isoform 2 of Myelin expression factor 2 | −4.553 |
| IPI:IPI00338745.4 | QADVADQQTTELPAENGET | 170 | Hmgn1; | Non-histone chromosomal protein | −4.546 |
| | ENQSPAS*EEEKEAKS*D | | LOC100044391 | HMG-14 | |
| IPI:IPI00109318.1 | RNS*PMAQT*PPCHLPNIPG | 171 | Eif4ebp2 | Eukaryotic translation initiation | −4.531 |
| | VTSPGALIEDSK | | | factor 4E-binding protein 2 | |
| IPI:IPI00154084.2 | GFGDS*FGR | 172 | Myef2 | Isoform 2 of Myelin expression factor 2 | −4.429 |
| IPI:IPI00121519.1 | SYSESGLMGEPQPQGPPS* | 173 | Neurod1 | Neurogenic differentiation factor 1 | −4.393 |
| | WTDECLS*S*QDEEHEADKK | | | | |
| IPI:IPI00317794.5 | KEDS*DEDEDEEDEDDS*D | 174 | Ncl | Nucleolin | −4.345 |
| | EDEDDEEEDEFEPPIVK | | | | |
| IPI:IPI00399953.1 | VFTSDISDPVVASTSQAPG | 175 | Wnk1 | Serine/threonine-protein kinase WNK1 | −4.306 |
| | M#NLSHSASSLS*LQQAFS | | | | |
| | ELK | | | | |
| IPI:IPI00263048.1 | VS*SETHQGPGTPESK | 176 | Numa1 | Nuclear mitotic apparatus protein 1 | −4.079 |
| IPI:IPI00225062.2 | TPPSAPS*QSRM#T*SER | 177 | Srrm2 | Isoform 3 of Serine/arginine repetitive | −4.002 |
| | | | | matrix protein 2 | |
| IPI:IPI00263048.1 | VSS*ETHQGPGTPESK | 178 | Numa1 | Nuclear mitotic apparatus protein 1 | −3.674 |
| IPI:IPI00664808.2 | SSSPT*NSLTQPIEMPTLSS | 179 | Kdm3b | Isoform 2 of Lysine-specific | −3.64 |
| | S*PTEER\hat{ }PTVGPGQQDNP | | | demethylase 3B | |
| | LLK@ | | | | |
| IPI:IPI00225062.2 | RKETPS*PR | 180 | Srrm2 | Isoform 3 of Serine/arginine repetitive | −3.569 |
| | | | | matrix protein 2 | |
| IPI:IPI00453603.1 | TPVS*PVKFS*PGDFWGR | 181 | Rps6kb1 | Isoform Alpha I of Ribosomal protein | −3.424 |
| | | | | S6 kinase beta-1 | |
| IPI:IPI00318938.6 | R\hat{ }VALGDGVQLPPGDY*ST | 182 | Eif4ebp1 | Eukaryotic translation initiation | −3.386 |
| | TPGGTLFSTTPGGT*R\hat{ } | | | factor 4E-binding protein 1 | |
| IPI:IPI00330066.5 | DSQDTSAEQS*DHDDEVAS | 183 | Edc4 | Isoform 1 of Enhancer of mRNA- | −3.347 |
| | LASASGGFGSK | | | decapping protein 4 | |
| IPI:IPI00399953.1 | DAMNLS*GR | 184 | Wnk1 | Serine/threonine-protein kinase WNK1 | −3.343 |
| IPI:IPI00127707.1 | LHQLAMQQSHFPMTHGNT | 185 | Pcbp2 | Isoform 1 of Poly(rC)-binding protein 2 | −3.277 |
| | GFSGIESSS*PEVK | | | | |
| IPI:IPI00458068.6 | SNS*LSEQLTVNSNPDTVK | 186 | Fkbp15 | Isoform B of FK506-binding protein 15 | −3.252 |
| IPI:IPI00116442.1 | S*EGLSLER | 187 | Hdgfrp2 | Isoform 3 of Hepatoma-derived growth | −3.127 |
| | | | | factor-related protein 2 | |
| IPI:IPI00116442.1 | S*EGLSLER\hat{ } | 188 | Hdgfrp2 | Isoform 3 of Hepatoma-derived growth | −3.127 |
| | | | | factor-related protein 2 | |
| IPI:IPI00112101.1 | TTQSLQDFPVADS*EEEAE | 189 | Tfip11 | Tuftelin-interacting protein 11 | −3.096 |
| | EEFQKELSQWR | | | | |
| IPI:IPI00750472.3 | TESASLSQS*QVNGFFASH | 190 | Ptpn13 | Tyrosine-protein phosphatase non- | −3.058 |
| | LGDR | | | receptor type 13 | |
| IPI:IPI00318938.6 | VALGDGVQLPPGDYS*TTP | 191 | Eif4ebp1 | Eukaryotic translation initiation | −3.042 |
| | GGT*LFST*TPGGTR | | | factor 4E-binding protein 1 | |
| IPI:IPI00317599.3 | SQEDEEEISTS*PGVSEFVS | 192 | Syap1 | Synapse-associated protein 1 | −3.022 |
| | DAFDTCS*LNQEDLRK | | | | |
| IPI:IPI00116442.1 | S*EGLSLER | 193 | Hdgfrp2 | Isoform 3 of Hepatoma-derived growth | −3.012 |
| | | | | factor-related protein 2 | |
| IPI:IPI00553798.2 | T*PEMIIQKPKIS*M#QDVDL | 194 | Ahnak | AHNAK nucleoprotein isoform 1 | −2.987 |
| | S*LGSCK | | | | |
| IPI:IPI00751009.1 | TSEFPTPLFSGPLEPVACG | 195 | Srpk2 | serine/arginine-rich protein specific | −2.951 |
| | SVISEGSPLTEQEESSPSH | | | kinase 2 | |
| | DR\hat{ }S*R\hat{ } | | | | |
| IPI:IPI00127976.1 | MNILSSQS*PLHPSTLNAVI | 196 | Grb10 | Isoform 3 of Growth factor receptor- | −2.946 |
| | HR | | | bound protein 10 | |
| IPI:IPI00127976.1 | M#NILSS*QSPLHPSTLNAVI | 197 | Grb10 | Isoform 3 of Growth factor receptor- | −2.944 |
| | HR | | | bound protein 10 | |
| IPI:IPI00656285.2 | SSGLQTPECLS*REGS*PIP | 198 | Foxk1 | Forkhead box protein K1 | −2.896 |
| | HDPDLGSK | | | | |
| IPI:IPI00830829.1 | S*GEQITSS*PVS*PK | 199 | Hisppd1 | 140 kDa protein | −2.883 |
| IPI:IPI00380722.1 | LAWVGDVFTTT*PTDPRPL | 200 | Bat2 | Large proline-rich protein BAT2 | −2.824 |
| | TS*PLR | | | | |
| IPI:IPI00153986.2 | GTS*RPGTPSAEAASTSSTLR | 201 | Gtf2f1 | General transcription factor IIF | −2.802 |
| | | | | subunit 1 | |
| IPI:IPI00129276.2 | LES*LNIQR\hat{ } | 202 | Eif3a | Eukaryotic translation initiation | −2.792 |
| | | | | factor 3 subunit A | |
| IPI:IPI00121277.1 | SAS*ESYTQSFQSR | 203 | Pi4k2a | Phosphatidylinositol 4-kinase type 2- | −2.789 |
| | | | | alpha | |
| IPI:IPI00470003.3 | S*PTPKS*PPSR | 204 | Parva | Alpha-parvin | −2.746 |
| IPI:IPI00308971.1 | AEALSSLHGDDQDS*EDEV | 205 | Igf2r | Cation-independent mannose-6- | −2.738 |
| | LTVPEVK | | | phosphate receptor | |
| IPI:IPI00121277.1 | SASESYT*QSFQSR | 206 | Pi4k2a | Phosphatidylinositol 4-kinase type 2- | −2.723 |
| | | | | alpha | |
| IPI:IPI00130920.1 | VLS*PLR\hat{ }S*PPLLGSESPYE | 207 | Mtap1b | Microtubule-associated protein 1B | −2.715 |
| | DFLSADSK@ | | | | |
| IPI:IPI00129276.2 | LES*LNIQR | 208 | Eif3a | Eukaryotic translation initiation | −2.711 |
| | | | | factor 3 subunit A | |
| IPI:IPI00111169.1 | CSVS*LSNVEAR | 209 | Pla2g4a | Cytosolic phospholipase A2 | −2.664 |
| IPI:IPI00458068.6 | HS*S*GNSM#LLPSMSVTM | 210 | Fkbp15 | Isoform B of FK506-binding protein 15 | −2.641 |
| | ETSM#IM#SNIQR | | | | |
| IPI:IPI00751009.1 | TVSASS*T*GDLPK@ | 211 | Srpk2 | serine/arginine-rich protein-specific | −2.607 |
| | | | | kinase 2 | |
| IPI:IPI00222828.2 | S*SPNPFVGSPPK@ | 212 | Dab2 | Isoform p93 of Disabled homolog 2 | −2.599 |
| IPI:IPI00111169.1 | CSVS*LSNVEAR | 213 | Pla2g4a | Cytosolic phospholipase A2 | −2.579 |
| IPI:IPI00120886.3 | SVGDGET*VEFDVVEGEK | 214 | Ybx1 | Nuclease-sensitive element-binding | −2.553 |
| | | | | protein 1 | |
| IPI:IPI00751009.1 | TVS*ASS*TGDLPK@ | 215 | Srpk2 | serine/arginine-rich protein-specific | −2.534 |
| | | | | kinase 2 | |
| IPI:IPI00133349.1 | DR\hat{ }S*PS*PLR\hat{ }GNVVPS*PL | 216 | Carhsp1 | Calcium-regulated heat stable protein 1 | −2.512 |
| | PTR\hat{ } | | | | |
| IPI:IPI00469392.2 | GSGSVDET*LFALPAASEPV | 217 | Rtn4 | Isoform 1 of Reticulon-4 | −2.475 |
| | IPSSAEK | | | | |
| IPI:IPI00127976.1 | T*ASLPAIPNPFPELTGAAP | 218 | Grb10 | Isoform 3 of Growth factor receptor- | −2.437 |
| | GS*PPSVAPSS*LPPPPSQP | | | bound protein 10 | |
| | PAK | | | | |
| IPI:IPI00751009.1 | TSEFPTPLFSGPLEPVACG | 219 | Srpk2 | serine/arginine-rich protein-specific | −2.408 |
| | SVISEGSPLTEQEESSPSH | | | kinase 2 | |
| | DRS*R | | | | |
| IPI:IPI00761677.1 | S*RSPVDSPVPASMFAPEP | 220 | Gtpbp1 | GTP-binding protein 1 | −2.406 |
| | SS*PGAAR | | | | |
| IPI:IPI00468516.3 | TRT*VLS*LFDEDEDKVEDE | 221 | D6Wsu116e | Isoform 1 of Protein FAM21 | −2.398 |
| | SSTCAPQDGR | | | | |
| IPI:IPI00396728.3 | R\hat{ }VSGS*ATPNSEAPR\hat{ } | 222 | Ddx51 | ATP-dependent RNA helicase DDX51 | −2.351 |
| IPI:IPI00660767.2 | KRSDS*S*GGYTLSDVIQS* | 223 | Ibtk | Isoform 2 of Inhibitor of Bruton | −2.347 |
| | PPSAGLLK | | | tyrosine kinase | |
| IPI:IPI00226750.2 | TSST*CS*NES*LNAGGTPV | 224 | Tbc1d4 | 140 kDa protein | −2.275 |
| | TPR | | | | |
| IPI:IPI00113033.1 | RSPASSGSVAPQPS*SPPS | 225 | Ighmbp2 | DNA-binding protein SMUBP-2 | −2.241 |
| | *PAQAEPEPR | | | | |
| IPI:IPI00136107.1 | THS*TSSS*IGSGESPFSR | 226 | Ndrg3 | Protein NDRG3 | −2.202 |
| IPI:IPI00751009.1 | TSEFPTPLFSGPLEPVACG | 227 | Srpk2 | serine/arginine-rich protein-specific | −2.187 |
| | SVISEGSPLTEQEESSPSH | | | kinase 2 | |
| | DRS*R | | | | |
| IPI:IPI00321647.2 | QNPEQS*ADEDAEKNEEDS | 228 | Eif3c | Eukaryotic translation initiation | −2.165 |
| | *EGS*S*DEDEDEDGVGNTT | | | factor 3 subunit C | |
| | FLKK | | | | |
| IPI:IPI00453800.4 | HSSFADTGAAPSALSPESP | 229 | Zfp828 | Zinc finger protein 828 | −2.147 |
| | VLATS*PEPWGPS*LSASPE | | | | |
| | SR\hat{ } | | | | |
| IPI:IPI00136107.1 | THS*TSSS*IGSGESPFSR\hat{ } | 230 | Ndrg3 | Protein NDRG3 | −2.124 |
| IPI:IPI00377615.2 | RSS*RS*FSLDEPPLFIPDNI | 231 | Phf3 | PHD finger protein 3 | −2.124 |
| | ATVK | | | | |
| IPI:IPI00377615.2 | R\hat{ }SSR\hat{ }S*FS*LDEPPLFIPD | 232 | Phf3 | PHD finger protein 3 | −2.124 |
| | NIATVK@ | | | | |
| IPI:IPI00127415.1 | CGSGPVHISGQHLVAVEED | 233 | Npm1 | Nucleophosmin | −2.101 |
| | AES*EDEDEEDVKLLGM#S | | | | |
| | GK | | | | |
| IPI:IPI00331075.4 | SLNFQEDDDT*S*RETFASD | 234 | Phax | Phosphorylated adapter RNA export | −2.101 |
| | TNEALASLDEAQEGPGETK | | | protein | |
| IPI:IPI00136107.1 | THSTSS*S*IGSGESPFSR\hat{ } | 235 | Ndrg3 | Protein NDRG3 | −2.098 |
| IPI:IPI00136107.1 | THST*SSS*IGSGESPFSR | 236 | Ndrg3 | Protein NDRG3 | −2.098 |
| IPI:IPI00669522.4 | SRS*DIDVNAAASAK | 237 | Clasp1 | Isoform 2 of CLIP-associating protein 1 | −2.073 |
| IPI:IPI00117953.2 | S*TDSPVAGS*EDDLVAAAP | 238 | Bicc1; | Isoform 1 of Protein bicaudal C | −2.07 |
| | LLHSPEWSEER\hat{ } | | 4930533K18Rik | homolog 1 | |
| IPI:IPI00137229.1 | GFQFVSSS*LPDICYR | 239 | Cnbp | Isoform 2 of Cellular nucleic acid- | −2.061 |
| | | | | binding protein | |
| IPI:IPI00380309.3 | AMLDQLMGTS*R | 240 | Luc7l2 | Isoform 1 of Putative RNA-binding | −2.046 |
| | | | | protein Luc7-like 2 | |
| IPI:IPI00153986.2 | GTSRPGT*PSAEAASTSSTLR | 241 | Gtf2f1 | General transcription factor IIF | −2.035 |
| | | | | subunit 1 | |
| IPI:IPI00330262.5 | S*QDDAMVDYFFQR | 242 | Pum1 | Isoform 1 of Pumilio homolog 1 | −2.02 |
| IPI:IPI00312128.3 | LDLDLTS*DSQPPVFK | 243 | Trim28 | Isoform 1 of Transcription intermediary | −2.01 |
| | | | | factor 1-beta | |
| IPI:IPI00667973.3 | IRQPS*IDLT*DDDQTSSVPH | 244 | Cep170 | Isoform 1 of Centrosomal protein | −1.979 |
| | SAISDIMSSDQETYSCK | | | of 170 kDa | |
| IPI:IPI00468516.3 | TRT*VLS*LFDEDEDKVEDE | 245 | D6Wsu116e | Isoform 1 of Protein FAM21 | −1.956 |
| | SSTCAPQDGR | | | | |
| IPI:IPI00136207.6 | YTPTSPSY*SPSSPEYTPAS | 246 | Polr2a | DNA-directed RNA polymerase II | −1.95 |
| | PK@ | | | subunit RPB1 | |
| IPI:IPI00225062.2 | SLLPNSSQDELM#EVEKSE | 247 | Srrm2 | Isoform 3 of Serine/arginine repetitive | −1.937 |
| | QPLSQVLPSLS*PEHK | | | matrix protein 2 | |
| IPI:IPI00222828.2 | S*SPNPFVGSPPK@ | 248 | Dab2 | Isoform p93 of Disabled homolog 2 | −1.915 |
| IPI:IPI00309059.7 | RS*TS*PIIGS*PPVR | 249 | Patl1 | Protein PAT1 homolog 1 | −1.901 |
| IPI:IPI00309059.7 | RST*S*PIIGS*PPVR | 250 | Patl1 | Protein PAT1 homolog 1 | −1.896 |
| IPI:IPI00338745.4 | QADVADQQTTELPAENGET | 251 | Hmgn1; | Non-histone chromosomal protein | −1.895 |
| | ENQSPASEEEKEAKS*D | | LOC100044391 | HMG-14 | |
| IPI:IPI00417158.1 | SQTPQLHFLDT*DDEISPTS | 252 | Smg6 | Telomerase-binding protein EST1A | −1.895 |
| | WGDSR\hat{ } | | | | |
| IPI:IPI00761759.1 | SSS*GSEHSTEGSVSLGDG | 253 | Larp4 | Putative uncharacterized protein | −1.89 |
| | PLSR | | | | |
| IPI:IPI00314502.5 | VHGLPT*TSPSGVNMAELA | 254 | Tcfeb | Transcription factor EB | −1.887 |
| | QQVVK | | | | |
| IPI:IPI00117689.1 | ATEEPSGTGS*DELIK@SD | 255 | Ptrf | Polymerase I and transcript release | −1.875 |
| | QVNGVLVLSLLDK@ | | | factor | |
| IPI:IPI00462949.4 | AENIMAS*LER | 256 | Dock11 | Dedicator of cytokinesis protein 11 | −1.851 |
| IPI:IPI00471475.1 | FDQLFDDES*DPFEVLK@ | 257 | Serbp1 | Isoform 1 of Plasminogen activator | −1.845 |
| | | | | inhibitor 1 RNA-binding protein | |
| IPI:IPI00471475.1 | FDQLFDDES*DPFEVLK | 258 | Serbp1 | Isoform 1 of Plasminogen activator | −1.845 |
| | | | | inhibitor 1 RNA-binding protein | |
| IPI:IPI00309059.7 | RS*TS*PIIGS*PPVR | 259 | Patl1 | Protein PAT1 homolog 1 | −1.837 |
| IPI:IPI00331612.3 | K@PAQETEETSS*QES*AE | 260 | Hmga2 | High mobility group protein HMGI-C | −1.834 |
| | ED | | | | |
| IPI:IPI00929786.1 | SLPT*TVPES*PNYR\hat{ } | 261 | Larp1 | Isoform 1 of La-related protein 1 | −1.823 |
| IPI:IPI00112101.1 | TTQSLQDFPVADS*EEEAE | 262 | Tfip11 | Tuftelin-interacting protein 11 | −1.813 |
| | EEFQKELSQWR | | | | |
| IPI:IPI00133685.1 | SSDEENGPPSS*PDLDR | 263 | Akt1s1 | Proline-rich AKT1 substrate 1 | −1.779 |
| IPI:IPI00761443.2 | SLS*ESYELSSDLQDK | 264 | Iqsec1 | IQ motif and Sec7 domain 1 isoform b | −1.779 |
| IPI:IPI00318938.6 | NS*PVAKTPPKDLPAIPGVT | 265 | Eif4ebp1 | Eukaryotic translation initiation | −1.776 |
| | *SPTSDEPPMQASQSQLPS | | | factor 4E-binding protein 1 | |
| | SPEDK | | | | |
| IPI:IPI00318938.6 | NSPVAKT*PPKDLPAIPGVT | 266 | Eif4ebp1 | Eukaryotic translation initiation | −1.776 |
| | SPT*SDEPPMQASQSQLPS | | | factor 4E-binding protein 1 | |
| | SPEDK | | | | |
| IPI:IPI00421179.1 | SFS*KEVEER | 267 | Eif4g1 | Isoform 1 of Eukaryotic translation | −1.77 |
| | | | | initiation factor 4 gamma 1 | |
| IPI:IPI00379844.4 | TYS*LTTPAR | 268 | Irs2 | Insulin receptor substrate 2 | −1.769 |
| IPI:IPI00379844.4 | TYS*LTTPAR | 269 | Irs2 | Insulin receptor substrate 2 | −1.769 |
| IPI:IPI00127989.1 | FSEM#M#DHMGGDEDVDL | 270 | Ptges3; | Prostaglandin E synthase 3 | −1.762 |
| | PEVDGADDDS*QDS*DDEK | | Gm9769; | | |
| | MPDLE | | LOC100048119 | | |
| IPI:IPI00127989.1 | FSEM#M#DHMGGDEDVDL | 271 | Ptges3; | Prostaglandin E synthase 3 | −1.762 |
| | PEVDGADDDS*QDS*DDEK | | Gm9769; | | |
| | @MPDLE | | LOC100048119 | | |
| IPI:IPI00320208.3 | YGPSSVEDTTGSGAADAK | 272 | Eef1b2 | Elongation factor 1-beta | −1.754 |
| | @DDDDIDLFGS*DDEEESE | | | | |
| | EAK@ | | | | |
| IPI:IPI00318938.6 | NS*PVAK@T*PPK@DLPAI | 273 | Eif4ebp1 | Eukaryotic translation initiation | −1.752 |
| | PGVTSPTSDEPPMQASQS | | | factor 4E-binding protein 1 | |
| | QLPSSPEDK@ | | | | |
| IPI:IPI00317794.5 | KEDS*DEDEDEEDEDDS*D | 274 | Ncl | Nucleolin | −1.75 |
| | EDEDDEEEDEFEPPIVK | | | | |
| IPI:IPI00116331.1 | S*RTPSAS*HEEQQE | 275 | Sgta | Isoform 1 of Small glutamine-rich | −1.747 |
| | | | | tetratricopeptide repeat-containing | |
| | | | | protein alpha | |
| IPI:IPI00116331.1 | S*R\hat{ }TPS*ASHEEQQE | 276 | Sgta | Isoform 1 of Small glutamine-rich | −1.747 |
| | | | | tetratricopeptide repeat-containing | |
| | | | | protein alpha | |
| IPI:IPI00553798.2 | FGT*FGGLGS*K | 277 | Ahnak | AHNAK nucleoprotein isoform 1 | −1.745 |
| IPI:IPI00130510.1 | LQDISELLAT*GVGLS*DSEV | 278 | Ppan | Suppressor of SWI4 1 homolog | −1.743 |
| | EPDGEHNTTELPQAVAGR\hat{ } | | | | |
| IPI:IPI00330262.5 | S*QDDAMVDYFFQR | 279 | Pum1 | Isoform 1 of Pumilio homolog 1 | −1.734 |
| IPI:IPI00459468.2 | LSESSALKQPAT*PTAAES* | 280 | Wmip1 | Isoform 1 of ATPase WRNIP1 | −1.728 |
| | S*EGEGEEGDDGGETESR | | | | |
| IPI:IPI00130573.1 | SLLSHEFQDET*DT*EEETL | 281 | Cpd | Carboxypeptidase D | −1.723 |
| | YSSK | | | | |
| IPI:IPI00468516.3 | TSALLFSS*DEEDQWNIADS | 282 | D6Wsu116e | Isoform 1 of Protein FAM21 | −1.718 |
| | HTK | | | | |
| IPI:IPI00468516.3 | TSALLFSS*DEEDQWNIADS | 283 | D6Wsu116e | Isoform 1 of Protein FAM21 | −1.718 |
| | HTK | | | | |
| IPI:IPI00109676.6 | SSGSSSSGLGTVSS*SPAS | 284 | Phf8 | Isoform 1 of PHD finger protein 8 | −1.715 |
| | QR | | | | |
| IPI:IPI00399953.1 | VFTSDISDPVVAST*SQAPG | 285 | Wnk1 | Serine/threonine-protein kinase WNK1 | −1.704 |
| | MNLSHSASSLSLQQAFSELK | | | | |
| IPI:IPI00399953.1 | VFTSDISDPVVASTSQAPG | 286 | Wnk1 | Serine/threonine-protein kinase WNK1 | −1.704 |
| | MNLSHSASS*LSLQQAFSE | | | | |
| | LK@ | | | | |
| IPI:IPI00225062.2 | RSSS*ELS*PEVVEK | 287 | Srrm2 | Isoform 3 of Serine/arginine repetitive | −1.702 |
| | | | | matrix protein 2 | |
| IPI:IPI00116331.1 | S*RTPS*ASHEEQQE | 288 | Sgta | Isoform 1 of Small glutamine-rich | −1.694 |
| | | | | tetratricopeptide repeat-containing | |
| | | | | protein alpha | |
| IPI:IPI00116331.1 | SRT*PS*ASHEEQQE | 289 | Sgta | Isoform 1 of Small glutamine-rich | −1.69 |
| | | | | tetratricopeptide repeat-containing | |
| | | | | protein alpha | |
| IPI:IPI00116331.1 | S*R\hat{ }TPS*ASHEEQQE | 290 | Sgta | Isoform 1 of Small glutamine-rich | −1.69 |
| | | | | tetratricopeptide repeat-containing | |
| | | | | protein alpha | |
| IPI:IPI00405752.3 | VLQESDVS*PSSSTTSLPIS* | 291 | C130092O11Rik | Isoform 1 of Uncharacterized protein | −1.689 |
| | PLTEEPLPFKDITR | | | KIAA1680 | |
| IPI:IPI00380415.2 | ALS*LS*SADS*TDAKR | 292 | Bat2l | Isoform 1 of Protein BAT2-like | −1.687 |
| IPI:IPI00130510.1 | LQDISELLATGVGLS*DS*EV | 293 | Ppan | Suppressor of SWI4 1 homolog | −1.68 |
| | EPDGEHNTTELPQAVAGR | | | | |
| IPI:IPI00229859.1 | AKPAAQS*EEETATS*PAAS | 294 | Eif3b | Eif3b protein | −1.677 |
| | *PTPQSAERS*PSQEPSAP | | | | |
| | GK | | | | |
| IPI:IPI00224200.1 | RLS*S*TGGQTPR | 295 | Iws1 | Isoform 1 of Protein IWS1 homolog | −1.663 |
| IPI:IPI00225062.2 | R\hat{ }SSS*ELS*PEVVEK@ | 296 | Srrm2 | Isoform 3 of Serine/arginine repetitive | −1.663 |
| | | | | matrix protein 2 | |
| IPI:IPI00331612.3 | K@PAQETEETS*SQES*AE | 297 | Hmga2 | High mobility group protein HMGI-C | −1.658 |
| | ED | | | | |
| IPI:IPI00229645.2 | K@GSS*GNAS*EVSVACLT | 298 | Cytsa | Cytospin-A | −1.657 |
| | ER\hat{ } | | | | |
| IPI:IPI00317794.5 | KEDS*DEDEDEEDEDDS*D | 299 | Ncl | Nucleolin | −1.637 |
| | EDEDDEEEDEFEPPIVK | | | | |
| IPI:IPI00663627.1 | GFLDGVYSFEYYPS*TPGK | 300 | Flnb | Filamin-B | −1.621 |
| IPI:IPI00312128.3 | LDLDLTSDS*QPPVFK | 301 | Trim28 | Isoform 1 of Transcription intermediary | −1.616 |
| | | | | factor 1-beta | |
| IPI:IPI00225062.2 | HSGS*TSPY*PK@ | 302 | Srrm2 | Isoform 3 of Serine/arginine repetitive | −1.603 |
| | | | | matrix protein 2 | |
| IPI:IPI00312414.4 | TSTFCGT*PEFLAPEVLTET | 303 | Pkn2 | Isoform 1 of Serine/threonine-protein | −1.603 |
| | SYTR\hat{ } | | | kinase N2 | |
| IPI:IPI00553798.2 | S*NS*FSDER\hat{ }EFSAPST*PT | 304 | Ahnak | AHNAK nucleoprotein isoform 1 | −1.602 |
| | GT*LEFAGGDAK@ | | | | |
| IPI:IPI00126176.3 | VSLLGPVT*T*PEFQLVKTPL | 305 | Racgap1 | Rac GTPase-activating protein 1 | −1.597 |
| | SSSLSQR | | | | |
| IPI:IPI00225062.2 | GSLSRSS*S*PVTELTAR | 306 | Srrm2 | Isoform 3 of Serine/arginine repetitive | −1.593 |
| | | | | matrix protein 2 | |
| IPI:IPI00399953.1 | VFTSDISDPVVASTSQAPG | 307 | Wnk1 | Serine/threonine-protein kinase WNK1 | −1.588 |
| | MNLSHS*ASSLSLQQAFSE | | | | |
| | LK | | | | |
| IPI:IPI00226155.3 | VSALEEDMDDVES*S*EEEE | 308 | Prpf38a | Isoform 1 of Pre-mRNA-splicing factor | −1.585 |
| | EEDEKLER | | | 38A | |
| IPI:IPI00226155.3 | VSALEEDMDDVES*S*EEEE | 309 | Prpf38a | Isoform 1 of Pre-mRNA-splicing factor | −1.585 |
| | EEDEK@LER\hat{ } | | | 38A | |
| IPI:IPI00116331.1 | S*RTPS*ASHEEQQE | 310 | Sgta | Isoform 1 of Small glutamine-rich | −1.58 |
| | | | | tetratricopeptide repeat-containing | |
| | | | | protein alpha | |
| IPI:IPI00116331.1 | S*R\hat{ }TPS*ASHEEQQE | 311 | Sgta | Isoform 1 of Small glutamine-rich | −1.58 |
| | | | | tetratricopeptide repeat-containing | |
| | | | | protein alpha | |
| IPI:IPI00135660.5 | SLEETLHNVDLS*S*DDELP | 312 | Sdpr | Serum deprivation-response protein | −1.577 |
| | R\hat{ }DEEALEDSAEEK@ | | | | |
| IPI:IPI00323349.2 | HSSHDMLSHS*WEGNR | 313 | Tjp2 | Tight junction protein ZO-2 | −1.566 |
| IPI:IPI00169500.3 | TESILDKEDKVPMAGVGGT | 314 | Atxn2l | Isoform 1 of Ataxin-2-like protein | −1.564 |
| | EGPEQLPAPCPSQTGS*PP | | | | |
| | VGLIK | | | | |
| IPI:IPI00118143.1 | K@QTPPASPS*PQPIEDR\hat{ } | 315 | Cttn | Src substrate cortactin | −1.556 |
| | PPS*SPIYEDAAPFK@ | | | | |
| IPI:IPI00127415.1 | TVSLGAGAK@DELHIVEAE | 316 | Npm1 | Nucleophosmin | −1.555 |
| | AM#NYEGS*PIK@VTLATLK@ | | | | |
| IPI:IPI00225062.2 | SLLPNSSQDELMEVEK@S | 317 | Srrm2 | Isoform 3 of Serine/arginine repetitive | −1.55 |
| | EQPLSQVLPSLS*PEHK@ | | | matrix protein 2 | |
| IPI:IPI00225062.2 | SLLPNSSQDELMEVEKSEQ | 318 | Srrm2 | Isoform 3 of Serine/arginine repetitive | −1.55 |
| | PLSQVLPSLS*PEHK | | | matrix protein 2 | |
| IPI:IPI00320267.1 | GDQVLNFS*DAEDLIDDSK | 319 | Mcrs1 | Microspherule protein 1 | −1.55 |
| | @LK@ | | | | |
| IPI:IPI00320267.1 | GDQVLNFS*DAEDLIDDSKLK | 320 | Mcrs1 | Microspherule protein 1 | −1.55 |
| IPI:IPI00553798.2 | SNS*FSDER\hat{ }EFS*APS*TPT | 321 | Ahnak | AHNAK nucleoprotein isoform 1 | −1.548 |
| | *GTLEFAGGDAK@ | | | | |
| IPI:IPI00116331.1 | S*RTPS*ASHEEQQE | 322 | Sgta | Isoform 1 of Small glutamine-rich | −1.543 |
| | | | | tetratricopeptide repeat-containing | |
| | | | | protein alpha | |
| IPI:IPI00222828.2 | SSPNPFVGS*PPK | 323 | Dab2 | Isoform p93 of Disabled homolog 2 | −1.531 |
| IPI:IPI00317794.5 | KEDS*DEDEDEEDEDDS*D | 324 | Ncl | Nucleolin | −1.531 |
| | EDEDDEEEDEFEPPIVK | | | | |
| IPI:IPI00225062.2 | RSS*SELS*PEVVEK | 325 | Srrm2 | Isoform 3 of Serine/arginine repetitive | −1.524 |
| | | | | matrix protein 2 | |
| IPI:IPI00225062.2 | R\hat{ }SS*S*ELSPEVVEK@ | 326 | Srrm2 | Isoform 3 of Serine/arginine repetitive | −1.524 |
| | | | | matrix protein 2 | |
| IPI:IPI00116331.1 | S*RTPS*ASHEEQQE | 327 | Sgta | Isoform 1 of Small glutamine-rich | −1.52 |
| | | | | tetratricopeptide repeat-containing | |
| | | | | protein alpha | |
| IPI:IPI00380415.2 | ALS*LS*S*ADSTDAKR | 328 | Bat2l | Isoform 1 of Protein BAT2-like | −1.519 |
| IPI:IPI00225062.2 | RSSS*ELS*PEVVEK | 329 | Srrm2 | Isoform 3 of Serine/arginine repetitive | −1.518 |
| | | | | matrix protein 2 | |
| IPI:IPI00225062.2 | R\hat{ }SSS*ELS*PEVVEK@ | 330 | Srrm2 | Isoform 3 of Serine/arginine repetitive | −1.518 |
| | | | | matrix protein 2 | |
| IPI:IPI00399469.2 | VS*PPAS*PTLDVELGAGEA | 331 | Sh3rf1 | Isoform 2 of Putative E3 ubiquitin- | −1.504 |
| | PLQGAVGPELPLGGSHGR | | | protein ligase SH3RF1 | |
| IPI:IPI00225062.2 | R\hat{ }SS*SELS*PEVVEK@ | 332 | Srrm2 | Isoform 3 of Serine/arginine repetitive | −1.501 |
| | | | | matrix protein 2 | |
| IPI:IPI00137501.1 | TEMDKS*PFNS*PSPQDS*PR | 333 | Nfic | Isoform 1 of Nuclear factor 1 C-type | −1.498 |
| IPI:IPI00309059.7 | RSTS*PIIGS*PPVR | 334 | Patl1 | Protein PAT1 homolog 1 | −1.498 |
| IPI:IPI00225062.2 | RSS*SELS*PEVVEK | 335 | Srrm2 | Isoform 3 of Serine/arginine repetitive | −1.497 |
| | | | | matrix protein 2 | |
| IPI:IPI00116331.1 | S*R\hat{ }TPS*ASHEEQQE | 336 | Sgta | Isoform 1 of Small glutamine-rich | −1.493 |
| | | | | tetratricopeptide repeat-containing | |
| | | | | protein alpha | |
| IPI:IPI00470095.1 | HGS*GADS*DYENTQSGDP | 337 | Git1 | ARF GTPase-activating protein GIT1 | −1.488 |
| | LLGLEGK@ | | | | |
| IPI:IPI00470095.1 | HGS*GADS*DYENTQSGDP | 338 | Git1 | ARF GTPase-activating protein GIT1 | −1.488 |
| | LLGLEGK | | | | |
| IPI:IPI00225062.2 | IHTTALTGQS*PPLASGHQG | 339 | Srrm2 | Isoform 3 of Serine/arginine repetitive | −1.479 |
| | EGDAPSVEPGATNIQQPSS | | | matrix protein 2 | |
| | *PAPS*TK | | | | |
| IPI:IPI00116442.1 | TRLAS*ESANDDNEDS | 340 | Hdgfrp2 | Isoform 3 of Hepatoma-derived growth | −1.456 |
| | | | | factor-related protein 2 | |
| IPI:IPI00225062.2 | GSLSRSS*S*PVTELTAR | 341 | Srrm2 | Isoform 3 of Serine/arginine repetitive | −1.454 |
| | | | | matrix protein 2 | |
| IPI:IPI00320267.1 | GDQVLNFS*DAEDLIDDSK | 342 | Mcrs1 | Microspherule protein 1 | −1.454 |
| IPI:IPI00225062.2 | RSSS*ELS*PEVVEK | 343 | Srrm2 | Isoform 3 of Serine/arginine repetitive | −1.445 |
| | | | | matrix protein 2 | |
| IPI:IPI00661508.3 | S*IDPDSIQSALLASGLGSK@ | 344 | Sbno1 | Isoform 2 of Protein strawberry notch | −1.442 |
| | | | | homolog 1 | |
| IPI:IPI00661508.3 | S*IDPDSIQSALLASGLGSK | 345 | Sbno1 | Isoform 2 of Protein strawberry notch | −1.442 |
| | | | | homolog 1 | |
| IPI:IPI00317794.5 | K@EDS*DEDEDEEDEDDS* | 346 | Ncl | Nucleolin | −1.441 |
| | DEDEDDEEEDEFEPPIVK@ | | | | |
| IPI:IPI00225267.6 | ATPTESPEKPPPPAVQRDE | 347 | 2310022B05Rik | Uncharacterized protein C1orf198 | −1.438 |
| | DDDALFS*EPALAQISSSNV | | | homolog | |
| | LLK | | | | |
| IPI:IPI00122594.4 | EVS*VSS*VTEEPKLDSSQL | 348 | Ahctf1 | AT-hook-containing transcription | −1.437 |
| | PLQTGLDVPATPR | | | factor 1 | |
| IPI:IPI00129356.1 | SAFTPATATGS*S*PSPVLG | 349 | Itsn1 | lsoform 1 of Intersectin-1 | −1.43 |
| | QGEK@VEGLQAQALYPWR\hat{ } | | | | |
| IPI:IPI00318938.6 | NS*PVAKT*PPKDLPAIPGV | 350 | Eif4ebp1 | Eukaryotic translation initiation | −1.412 |
| | TSPTSDEPPMQASQSQLPS | | | factor 4E-binding protein 1 | |
| | S*PEDK | | | | |
| IPI:IPI00224200.1 | VVCDADDS*DSDVVSDK@ | 351 | Iws1 | Isoform 1 of Protein IWS1 homolog | −1.403 |
| IPI:IPI00321647.2 | QNPEQSADEDAEK@NEED | 352 | Eif3c | Eukaryotic translation initiation | −1.399 |
| | S*EGS*S*DEDEDEDGVGN | | | factor 3 subunit C | |
| | TTFLK@ | | | | |
| IPI:IPI00664808.2 | VSESVADDS*SS*RDSFTQS | 353 | Kdm3b | Isoform 2 of Lysine-specific | −1.393 |
| | LESLTSGLCK | | | demethylase 3B | |
| IPI:IPI00122863.2 | RGQS*PQPDQGP | 354 | Rarg | Isoform 2 of Retinoic acid receptor | −1.387 |
| | | | | gamma | |
| IPI:IPI00453853.2 | TPVASECTQTDGAEEVAGS | 355 | Bap1 | Ubiquitin carboxyl-terminal hydrolase | −1.38 |
| | CPQTTTHS*PPSK@ | | | BAP1 | |
| IPI:IPI00132028.1 | K@GS*DDDGGDS*PVQDID | 356 | Sap30 | Histone deacetylase complex subunit | −1.376 |
| | TPEVDLYQLQVNTLR\hat{ } | | | SAP30 | |
| IPI:IPI00132028.1 | KGS*DDDGGDS*PVQDIDT | 357 | Sap30 | Histone deacetylase complex subunit | −1.376 |
| | PEVDLYQLQVNTLR | | | SAP30 | |
| IPI:IPI00318938.6 | NS*PVAKT*PPKDLPAIPGV | 358 | Eif4ebp1 | Eukaryotic translation initiation | −1.374 |
| | TSPTSDEPPMQASQSQLPS | | | factor 4E-binding protein 1 | |
| | S*PEDK | | | | |
| IPI:IPI00116442.1 | TRLAS*ESANDDNEDS | 359 | Hdgfrp2 | Isoform 3 of Hepatoma-derived growth | −1.358 |
| | | | | factor-related protein 2 | |
| IPI:IPI00153986.2 | GTS*RPGT*PSAEAASTSST | 360 | Gtf2f1 | General transcription factor IIF | −1.348 |
| | LR | | | subunit 1 | |
| IPI:IPI00226149.6 | GSASES*PSASVAEATTTD | 361 | Rsl1d1 | Putative uncharacterized protein | −1.342 |
| | VQVTPTALLQLDR\hat{ } | | | | |
| IPI:IPI00226149.6 | GS*ASESPSASVAEATTTD | 362 | Rsl1d1 | Putative uncharacterized protein | −1.342 |
| | VQVTPTALLQLDR\hat{ } | | | | |
| IPI:IPI00313307.3 | SYQNSPS*S*EDGIRPLPEY | 363 | Med1 | Isoform 4 of Mediator of RNA | −1.337 |
| | STEK | | | polymerase II transcription subunit 1 | |
| IPI:IPI00656285.2 | S*LVS*PIPSPTGTISVPNSC | 364 | Foxk1 | Forkhead box protein K1 | −1.327 |
| | PAS*PR | | | | |
| IPI:IPI00320208.3 | YGPSSVEDTTGSGAADAK | 365 | Eef1b2 | Elongation factor 1-beta | −1.324 |
| | @DDDDIDLFGSDDEEES*E | | | | |
| | EAK@ | | | | |
| IPI:IPI00318938.6 | NS*PVAKT*PPKDLPAIPGV | 366 | Eif4ebp1 | Eukaryotic translation initiation | −1.322 |
| | TSPTSDEPPMQASQSQLPS | | | factor 4E-binding protein 1 | |
| | S*PEDK | | | | |
| IPI:IPI00136572.4 | SSTHASVS*PASEPSR | 367 | Zc3hav1 | Isoform 1 of Zinc finger CCCH-type | −1.318 |
| | | | | antiviral protein 1 | |
| IPI:IPI00116442.1 | TRLAS*ES*ANDDNEDS | 368 | Hdgfrp2 | Isoform 3 of Hepatoma-derived growth | −1.315 |
| | | | | factor-related protein 2 | |
| IPI:IPI00116442.1 | TR\hat{ }LAS*ES*ANDDNEDS | 369 | Hdgfrp2 | Isoform 3 of Hepatoma-derived growth | −1.315 |
| | | | | factor-related protein 2 | |
| IPI:IPI00226149.6 | GS*ASESPSASVAEATTTD | 370 | Rsl1d1 | Putative uncharacterized protein | −1.314 |
| | VQVTPTALLQLDR\hat{ } | | | | |
| IPI:IPI00169500.3 | R\hat{ }SPGGT*SPPNGGLPGPL | 371 | Atxn2l | Isoform 1 of Ataxin-2-like protein | −1.308 |
| | TAT*AAPPGPPAAVSPCLG | | | | |
| | PAAAAGSGLR\hat{ } | | | | |
| IPI:IPI00467362.6 | S*ESLIDASEDS*QLEAAIR | 372 | Ubxn7 | UBX domain-containing protein 7 | −1.307 |
| IPI:IPI00124753.3 | RNTFIGTPY*WMAPEVIACD | 373 | Mink1 | misshapen-like kinase 1 isoform 2 | −1.302 |
| | ENPDATYDYR | | | | |
| IPI:IPI00110247.7 | SLSQS*FENLLDEPAYGLIQ | 374 | Tbc1d15 | TBC1 domain family member 15 | −1.301 |
| | K@ | | | | |
| IPI:IPI00276222.1 | KLDDQS*EDEALELEGPLIM | 375 | Fermt2 | Fermitin family homolog 2 | −1.293 |
| | PGSGSIYSS*PGLYSK | | | | |
| IPI:IPI00460668.2 | EVDYSDS*LTEK@ | 376 | Smarca4 | Putative uncharacterized protein | −1.293 |
| IPI:IPI00380736.1 | STTPT*PSVITR | 377 | Zfp516 | Zinc finger protein 516 | −1.259 |
| IPI:IPI00153986.2 | GTS*R\hat{ }PGT*PSAEAASTSS | 378 | Gtf2f1 | General transcription factor IIF | −1.251 |
| | TLR\hat{ } | | | subunit 1 | |
| IPI:IPI00230486.3 | LSSKLS*AVS*LR | 379 | Snx17 | Sorting nexin-17 | −1.24 |
| IPI:IPI00116331.1 | SR\hat{ }T*PSAS*HEEQQE | 380 | Sgta | Isoform 1 of Small glutamine-rich | −1.239 |
| | | | | tetratricopeptide repeat-containing | |
| | | | | protein alpha | |
| IPI:IPI00318938.6 | NS*PVAKT*PPKDLPAIPGV | 381 | Eif4ebp1 | Eukaryotic translation initiation | −1.238 |
| | TSPTSDEPPMQASQSQLPS | | | factor 4E-binding protein 1 | |
| | SPEDK | | | | |
| IPI:IPI00318938.6 | NS*PVAKT*PPKDLPAIPGV | 382 | Eif4ebp1 | Eukaryotic translation initiation | −1.238 |
| | TSPTSDEPPMQASQSQLPS | | | factor 4E-binding protein 1 | |
| | SPEDK | | | | |
| IPI:IPI00749954.8 | LR\hat{ }TDNAS*DAS*ESS*DAE | 383 | Jmjd1c | jumonji domain containing 1C | −1.235 |
| | SSSK@ | | | | |
| IPI:IPI00225062.2 | SVSSPR\hat{ }T*K@ | 384 | Srrm2 | Isoform 3 of Serine/arginine repetitive | −1.234 |
| | | | | matrix protein 2 | |
| IPI:IPI00136107.1 | THS*TSSSIGSGESPFSRA | 385 | Ndrg3 | Protein NDRG3 | −1.23 |
| IPI:IPI00136107.1 | THST*SSSIGSGESPFSR | 386 | Ndrg3 | Protein NDRG3 | −1.23 |
| IPI:IPI00113377.1 | K@EESEES*EDDMGFGLFD | 387 | Rplp1 | 60S acidic ribosomal protein P1 | −1.229 |
| IPI:IPI00553798.2 | GGVT*GSPEAS*IS*GSK@G | 388 | Ahnak | AHNAK nucleoprotein isoform 1 | −1.228 |
| | DLK@ | | | | |
| IPI:IPI00330240.7 | S*QDAESYQNVVELK@ | 389 | Peg3 | Isoform 1 of Paternally-expressed gene | −1.221 |
| | | | | 3 protein | |
| IPI:IPI00122845.1 | LGS*QEPER\hat{ } | 390 | | | −1.219 |
| IPI:IPI00224200.1 | VVCDADDS*DSDVVSDK@ | 391 | Iws1 | Isoform 1 of Protein IWS1 homolog | −1.219 |
| IPI:IPI00465879.2 | LCS*SSSSDTSPR\hat{ } | 392 | Zc3hc1 | Isoform 1 of Nuclear-interacting | −1.207 |
| | | | | partner of ALK | |
| IPI:IPI00116442.1 | TR\hat{ }LAS*ES*ANDDNEDS | 393 | Hdgfrp2 | Isoform 3 of Hepatoma-derived growth | −1.206 |
| | | | | factor-related protein 2 | |
| IPI:IPI00116442.1 | TRLAS*ES*ANDDNEDS | 394 | Hdgfrp2 | Isoform 3 of Hepatoma-derived growth | −1.206 |
| | | | | factor-related protein 2 | |
| IPI:IPI00322095.4 | IDEPNT*PYHNMIGDDEDAY | 395 | Ppp1r2 | Putative uncharacterized protein | −1.204 |
| | S*DSEGNEVMTPDILAK | | | | |
| IPI:IPI00322095.4 | IDEPNTPY*HNMIGDDEDAY | 396 | Ppp1r2 | Putative uncharacterized protein | −1.204 |
| | S*DSEGNEVMTPDILAK | | | | |
| IPI:IPI00387384.3 | LLCQEETPEAT*EDERDEER | 397 | Mett10d | Isoform 1 of Putative methyltransferase | −1.202 |
| | | | | METT10D | |
| IPI:IPI00330246.2 | WAAHGTS*PEDFSLTLGAR\hat{ } | 398 | Phldb1 | Isoform 2 of Pleckstrin homology-like | −1.202 |
| | | | | domain family B member 1 | |
| IPI:IPI00330246.2 | WAAHGTS*PEDFSLTLGAR | 399 | Phldb1 | Isoform 2 of Pleckstrin homology-like | −1.202 |
| | | | | domain family B member 1 | |
| IPI:IPI00678133.3 | SSHQDATDPEALWGVHQT | 400 | Inf2 | Isoform 1 of Inverted formin-2 | −1.199 |
| | EADS*T*S*EGPEDEAQR\hat{ } | | | | |
| IPI:IPI00465879.2 | LCS*SSSSDTSPR\hat{ } | 401 | Zc3hc1 | Isoform 1 of Nuclear-interacting | −1.189 |
| | | | | partner of ALK | |
| IPI:IPI00313513.6 | S*VDIFGSTPFQPFSVSASK | 402 | Bmp2k | Isoform 1 of BMP-2-inducible protein | −1.18 |
| | | | | kinase | |
| IPI:IPI00465879.2 | LCS*SSSSDTSPR | 403 | Zc3hc1 | Isoform 1 of Nuclear-interacting | −1.172 |
| | | | | partner of ALK | |
| IPI:IPI00465879.2 | LCS*SSSSDTSPR | 404 | Zc3hc1 | Isoform 1 of Nuclear-interacting | −1.171 |
| | | | | partner of ALK | |
| IPI:IPI00553798.2 | EFSAPST*PT*GTLEFAGGD | 405 | Ahnak | AHNAK nucleoprotein isoform 1 | −1.169 |
| | AK@ | | | | |
| IPI:IPI00317794.5 | K@EDS*DEDEDEEDEDDS* | 406 | Ncl | Nucleolin | −1.167 |
| | DEDEDDEEEDEFEPPIVK@ | | | | |
| IPI:IPI00465879.2 | LCS*SSSSDTSPR\hat{ } | 407 | Zc3hc1 | Isoform 1 of Nuclear-interacting | −1.163 |
| | | | | partner of ALK | |
| IPI:IPI00465879.2 | LCS*SSSSDTSPR | 408 | Zc3hc1 | Isoform 1 of Nuclear-interacting | −1.163 |
| | | | | partner of ALK | |
| IPI:IPI00229739.4 | LVVSS*PT*SPKGK | 409 | Plekhm1 | Pleckstrin homology domain-containing | −1.159 |
| | | | | family M member 1 | |
| IPI:IPI00465879.2 | LCS*SSSSDTSPR | 410 | Zc3hc1 | Isoform 1 of Nuclear-interacting | −1.156 |
| | | | | partner of ALK | |
| IPI:IPI00465879.2 | LCS*SSSSDTSPR\hat{ } | 411 | Zc3hc1 | Isoform 1 of Nuclear-interacting | −1.155 |
| | | | | partner of ALK | |
| IPI:IPI00225616.3 | DGAGS*PLR\hat{ }T*SPPSTPSS | 412 | Dennd2a | DENN domain-containing protein 2A | −1.15 |
| | PDDTFFNLGDLQNGR\hat{ } | | | | |
| IPI:IPI00720110.2 | VLTANSNPSS*PSAAK | 413 | 1600027N09Rik | RIKEN cDNA 1600027N09 gene | −1.148 |
| IPI:IPI00465879.2 | LCS*SSSSDTSPR | 414 | Zc3hc1 | Isoform 1 of Nuclear-interacting | −1.143 |
| | | | | partner of ALK | |
| IPI:IPI00461396.6 | STRHS*PSALQDVFVELLS* | 415 | Baz1a | bromodomain adjacent to zinc finger | −1.134 |
| | PHSK | | | domain 1A | |
| IPI:IPI00222828.2 | SSPNPFVGS*PPK@ | 416 | Dab2 | Isoform p93 of Disabled homolog 2 | −1.134 |
| IPI:IPI00222828.2 | SSPNPFVGS*PPK | 417 | Dab2 | Isoform p93 of Disabled homolog 2 | −1.134 |
| IPI:IPI00222828.2 | SSPNPFVGS*PPK | 418 | Dab2 | Isoform p93 of Disabled homolog 2 | −1.134 |
| IPI:IPI00225062.2 | GCS*PPKS*PEKPPQSTSS* | 419 | Srrm2 | Isoform 3 of Serine/arginine repetitive | −1.133 |
| | ESCPPSPQPTK | | | matrix protein 2 | |
| IPI:IPI00553798.2 | GGVTGS*PEAS*IS*GSK@G | 420 | Ahnak | AHNAK nucleoprotein isoform 1 | −1.132 |
| | DLK@ | | | | |
| IPI:IPI00318671.2 | DK@PVYDELFYTLS*PINGK@ | 421 | Ehd4 | EH-domain containing 4-KJR | −1.131 |
| | | | | (Fragment) | |
| IPI:IPI00129388.1 | HDHAVSLLTAASPT*ISLL | 422 | Scrib | Isoform 3 of Protein LAP4 | −1.13 |
| | LER | | | | |
| IPI:IPI00336973.2 | GLNLDGTPALSTLGGFS*PA | 423 | Ccnl1 | Isoform 1 of Cyclin-L1 | −1.124 |
| | SKPSS*PR | | | | |
| IPI:IPI00336973.2 | GLNLDGTPALSTLGGFS*PA | 424 | Ccnl1 | Isoform 1 of Cyclin-L1 | −1.124 |
| | SK@PSS*PR\hat{ } | | | | |
| IPI:IPI00317401.6 | METVSNASSSSNPSS*PGR\hat{ } | 425 | Pds5b | Isoform 1 of Sister chromatid cohesion | −1.12 |
| | | | | protein PDS5 homolog B | |
| IPI:IPI00317401.6 | METVSNASSSSNPSS*PGR | 426 | Pds5b | Isoform 1 of Sister chromatid cohesion | −1.12 |
| | | | | protein PDS5 homolog B | |
| IPI:IPI00471475.1 | HSGSDR\hat{ }S*SFSHYSGLK@ | 427 | Serbp1 | Isoform 1 of Plasminogen activator | −1.119 |
| | | | | inhibitor 1 RNA-binding protein | |
| IPI:IPI00330240.7 | S*QDAESYQNVVELK@ | 428 | Peg3 | Isoform 1 of Paternally-expressed gene | −1.108 |
| | | | | 3 protein | |
| IPI:IPI00153986.2 | GTS*RPGTPSAEAASTSSTLR | 429 | Gtf2f1 | General transcription factor IIF | −1.102 |
| | | | | subunit 1 | |
| IPI:IPI00453656.2 | KVAPLS*SSLDTSLDFSK | 430 | Uvrag | UV radiation resistance associated | −1.098 |
| IPI:IPI00127976.1 | SVS*ENS*LVAMDFSGQIGR | 431 | Grb10 | Isoform 3 of Growth factor receptor- | −1.097 |
| | | | | bound protein 10 | |
| IPI:IPI00135443.2 | KTS*FDQDS*DVDIFPSDFT | 432 | Top2b | DNA topoisomerase 2-beta | −1.092 |
| | SEPPALPR | | | | |
| IPI:IPI00331612.3 | KPAQETEETSS*QES*AEED | 433 | Hmga2 | High mobility group protein HMGI-C | −1.078 |
| IPI:IPI00331612.3 | K@PAQETEETSS*QES*AE | 434 | Hmga2 | High mobility group protein HMGI-C | −1.078 |
| | ED | | | | |
| IPI:IPI00320208.3 | YGPSSVEDTTGSGAADAK | 435 | Eef1b2 | Elongation factor 1-beta | −1.075 |
| | @DDDDIDLFGS*DDEEESE | | | | |
| | EAK@ | | | | |
| IPI:IPI00321884.1 | ESLPLDLS*DDQSNSK | 436 | Nvl | Nuclear valosin-containing protein-like | −1.071 |
| IPI:IPI00127415.1 | CGSGPVHISGQHLVAVEED | 437 | Npm1 | Nucleophosmin | −1.071 |
| | AES*EDEDEEDVK@LLGMS | | | | |
| | GK@ | | | | |
| IPI:IPI00553798.2 | GGVTGS*PEAS*ISGS*K@G | 438 | Ahnak | AHNAK nucleoprotein isoform 1 | −1.067 |
| | DLK@ | | | | |
| IPI:IPI00136107.1 | THST*SS*SIGSGESPFSR | 439 | Ndrg3 | Protein NDRG3 | −1.054 |
| IPI:IPI00130920.1 | VLS*PLR\hat{ }SPPLLGSES*PYE | 440 | Mtap1b | Microtubule-associated protein 1B | −1.054 |
| | DFLSADSK@ | | | | |
| IPI:IPI00349069.4 | GPQQDS*DS*DDGEALGGN | 441 | B230208H17Rik | Putative GTP-binding protein Parf | −1.048 |
| | PMVAGFQDDVDIEDQTHGK | | | | |
| IPI:IPI00349069.4 | GPQQDS*DS*DDGEALGGN | 442 | B230208H17Rik | Putative GTP-binding protein Parf | −1.048 |
| | PMVAGFQDDVDIEDQTHG | | | | |
| | K@ | | | | |
| IPI:IPI00408803.6 | GR\hat{ }ES*DEDT*EDAS*ETDL | 443 | Suds3 | Sin3 histone deacetylase corepressor | −1.047 |
| | AK@ | | | complex component SDS3 | |
| IPI:IPI00109311.3 | SASS*DTS*EELNS*QDSPK | 444 | Slc9a3r1 | Isoform 1 of Na(+)/H(+) exchange | −1.047 |
| | @R\hat{ } | | | regulatory cofactor NHE-RF1 | |
| IPI:IPI00136107.1 | THSTSS*SIGSGESPFSR\hat{ } | 445 | Ndrg3 | Protein NDRG3 | −1.042 |
| IPI:IPI00114560.5 | FRT*ITSSYYR | 446 | Rab1 | Ras-related protein Rab-1A | −1.042 |
| IPI:IPI00123410.5 | TIS*AQDTLAYATALLNEK | 447 | Usp24 | Isoform 1 of Ubiquitin carboxyl- | −1.04 |
| | | | | terminal hydrolase 24 | |
| IPI:IPI00169477.1 | NT*PSQHSHSIQHS*PER\hat{ } | 448 | Bclaf1 | Isoform 2 of Bcl-2-associated | −1.036 |
| | | | | transcription factor 1 | |
| IPI:IPI00317401.6 | AES*PETSAVESTQST*PQK | 449 | Pds5b | Isoform 1 of Sister chromatid cohesion | −1.036 |
| | | | | protein PDS5 homolog B | |
| IPI:IPI00317401.6 | METVSNASSSSNPSS*PGR\hat{ } | 450 | Pds5b | Isoform 1 of Sister chromatid cohesion | −1.035 |
| | | | | protein PDS5 homolog B | |
| IPI:IPI00317401.6 | METVSNASSSSNPSS*PGR | 451 | Pds5b | Isoform 1 of Sister chromatid cohesion | −1.035 |
| | | | | protein PDS5 homolog B | |
| IPI:IPI00229702.1 | KDS*PPLVT*PPQS*PPSSQ | 452 | Smtnl2 | Smoothelin-like protein 2 | −1.03 |
| | PPAMTQAPR | | | | |
| IPI:IPI00107999.1 | SSPS*ILAVQR | 453 | Chd1 | Chromodomain-helicase-DNA-binding | −1.019 |
| | | | | protein 1 | |
| IPI:IPI00107999.1 | SS*PSILAVQR\hat{ } | 454 | Chd1 | Chromodomain-helicase-DNA-binding | −1.019 |
| | | | | protein 1 | |
| IPI:IPI00118120.1 | TSS*IADEGTYTLDSILR | 455 | Myo5a | Myosin-Va | −1.018 |
| IPI:IPI00453848.5 | SAFK@LDS*DS*DEEDAQF | 456 | Atg2a | Protein | −1.014 |
| | FSMASGVPQTPAPEPSR\hat{ }R\hat{ } | | | | |
| IPI:IPI00330773.3 | AS*YSGTSPSHSFISGEPDR\hat{ } | 457 | Phldb2 | Isoform 1 of Pleckstrin homology-like | −1.013 |
| | | | | domain family B member 2 | |
| IPI:IPI00225062.2 | GCS*PPKS*PEKPPQSTSS* | 458 | Srrm2 | Isoform 3 of Serine/arginine repetitive | −1.003 |
| | ESCPPSPQPTK | | | matrix protein 2 | |
| IPI:IPI00229613.3 | SSS*SASQSNHSCTSMPSS | 459 | Macf1 | Isoform 3 of Microtubule-actin cross- | −1.003 |
| | PATPASGTK | | | linking factor 1 | |
| IPI:IPI00136107.1 | THS*TSSS*IGSGESPFSR\hat{ } | 460 | Ndrg3 | Protein NDRG3 | −1.002 |
| IPI:IPI00121135.5 | R.S*KS*PPKS*PEEEGAVS* | 461 | Sfrs2 | Splicing factor | −1 |
| | S. | | | | |
| IPI:IPI00126338.5 | R.SST*PLPTVS*SS*AENTR | 462 | Tmpo | Isoform Alpha of Lamina-associated | −1 |
| | \hat{ }.Q | | | polypeptide 2 | |
| IPI:IPI00623249.4 | R.T*DSVIIADQT*PT* | 463 | Atf7 | Activating transcription factor 7 | −1 |
| | PTR\hat{ }.F | | | | |

Rapa replicate 2 (Note: heavy cells were control and light cells were
treated with rapamycin. L, light; H, heavy.)

| | | | | | |
|---|---|---|---|---|---|
| IPI:IPI00330112.1 | VAPAGSAIS*NASGER\hat{ } | 464 | Mib1 | E3 ubiquitin-protein ligase MIB1 | 9.6909 |
| IPI:IPI00108454.2 | R\hat{ }LS*S*LR\hat{ }AS*TSK@ | 465 | rpS6 | 29 kDa protein | 9.6182 |
| IPI:IPI00108454.2 | R\hat{ }LS*S*LR\hat{ }AS*TSK@ | 466 | rpS6 | 29 kDa protein | 9.6182 |
| IPI:IPI00225062.2 | ELS*HSPPRENSFESSLEFK | 467 | Srrm2 | Isoform 3 of Serine/arginine repetitive | 9.4619 |
| | | | | matrix protein 2 | |
| IPI:IPI00108454.2 | R\hat{ }LS*S*LR\hat{ }AS*TSK@ | 468 | rpS6 | 29 kDa protein | 9.4253 |
| IPI:IPI00346155.4 | NFLS*MDS*LK@ | 469 | Gm13099 | Novel protein similar to preferentially | 9.2638 |
| | | | | expressed antigen in melanoma-like | |
| | | | | family | |
| IPI:IPI00649156.4 | NLAITGGVTLS*VIASPVI | 470 | Rnf19b | IBR domain containing 3 | 9.1171 |
| | AAVSVGIGVPIMLAY*VY* | | | | |
| | GVVPISLCR\hat{ } | | | | |
| IPI:IPI00108454.2 | R\hat{ }LS*S*LR\hat{ }AS*TSK@ | 471 | rpS6 | 29 kDa protein | 9.0561 |
| IPI:IPI00133349.1 | TR\hat{ }TFS*ATVR\hat{ } | 472 | Carhsp1 | Calcium-regulated heat stable protein 1 | 8.7001 |
| IPI:IPI00133349.1 | TR\hat{ }TFS*ATVR\hat{ } | 473 | Carhsp1 | Calcium-regulated heat stable protein 1 | 8.6779 |
| IPI:IPI00133349.1 | TR\hat{ }TFS*ATVR\hat{ } | 474 | Carhsp1 | Calcium-regulated heat stable protein 1 | 8.6519 |
| IPI:IPI00108454.2 | R\hat{ }LS*S*LR\hat{ }AS*TSK@ | 475 | rpS6 | 29 kDa protein | 8.6271 |
| IPI:IPI00351206.5 | GLCSGPGAGEESPAAT*LP | 476 | Pgrmc2 | Membrane-associated progesterone | 8.5943 |
| | R\hat{ }M#K@ | | | receptor component 2 | |
| IPI:IPI00108454.2 | LS*SLR\hat{ }AS*TSK@ | 477 | rpS6 | 29 kDa protein | 7.5465 |
| IPI:IPI00108454.2 | LSS*LR\hat{ }AS*TSK@ | 478 | rpS6 | 29 kDa protein | 7.5465 |
| IPI:IPI00131138.1 | AHVAPCFDAS*K@ | 479 | | | 7.3937 |
| IPI:IPI00125530.1 | WTNDYSMVLTGAAIY*HK@ | 480 | Ext1 | Exostosin-1 | 7.3545 |
| IPI:IPI00108454.2 | LSS*LR\hat{ }AS*TSK@ | 481 | rpS6 | 29 kDa protein | 7.1711 |
| IPI:IPI00108454.2 | LSS*LR\hat{ }AS*TSK@ | 482 | rpS6 | 29 kDa protein | 7.1711 |
| IPI:IPI00108454.2 | R\hat{ }LSS*LR\hat{ }AS*TSK@ | 483 | rpS6 | 29 kDa protein | 7.0714 |
| IPI:IPI00131138.1 | AHVAPCFDAS*K@ | 484 | | | 7.0413 |
| IPI:IPI00378564.4 | LVY*PEVK@ES*K@FK@ | 485 | Gm14085 | Novel protein similar to solute carrier | 6.9768 |
| | | | | family 28 (Sodium-coupled nucleoside | |
| | | | | transporter) member 2 | |
| IPI:IPI00108454.2 | R\hat{ }LSS*LR\hat{ }AS*TSK@ | 486 | rpS6 | 29 kDa protein | 6.9459 |
| IPI:IPI00133685.1 | AATATRPPGPPPAPQPPS* | 487 | Akt1s1 | Proline-rich AKT1 substrate 1 | 6.9065 |
| | PAPS*PPPRPALAR | | | | |
| IPI:IPI00316922.1 | R\hat{ }LGAAM#T*FPR\hat{ }PPSR\hat{ } | 488 | Gm9757 | Putative uncharacterized protein | 6.6604 |
| IPI:IPI00118875.4 | ATAPQTQHVS*PMR\hat{ } | 489 | Eef1d | eukaryotic translation elongation | 6.5442 |
| | | | | factor 1 delta isoform a | |
| IPI:IPI00109318.1 | R\hat{ }NS*PMAQT*PPCHLPNIP | 490 | Eif4ebp2 | Eukaryotic translation initiation | 6.5094 |
| | GVTSPGALIEDSK@ | | | factor 4E-binding protein 2 | |
| IPI:IPI00109318.1 | R\hat{ }NS*PMAQT*PPCHLPNIP | 491 | Eif4ebp2 | Eukaryotic translation initiation | 6.4811 |
| | GVTSPGALIEDSK@ | | | factor 4E-binding protein 2 | |
| IPI:IPI00131138.1 | AHVAPCFDAS*K@ | 492 | | | 6.4769 |
| IPI:IPI00757687.1 | LK@PDS*K@PFSR\hat{ } | 493 | Gon4l | RIKEN cDNA 5830417I10 gene | 6.4593 |
| IPI:IPI00121027.4 | ES*LS*HVLSK@ | 494 | Mogat1 | 2-acylglycerol O-acyltransferase 1 | 6.0819 |
| IPI:IPI00115681.1 | TECGS*TGS*PASSFHFK@ | 495 | Eef2k | Elongation factor 2 kinase | 5.912 |
| IPI:IPI00115681.1 | TECGS*T*GSPASSFHFK@ | 496 | Eef2k | Elongation factor 2 kinase | 5.912 |
| IPI:IPI00128818.2 | LYTEK@AY*K@ | 497 | Dhx15 | Putative pre-mRNA-splicing factor ATP- | 5.9047 |
| | | | | dependent RNA helicase DHX15 | |
| IPI:IPI00118438.4 | SR\hat{ }VS*VS*PGR\hat{ } | 498 | Srrm1 | Isoform 2 of Serine/arginine repetitive | 5.834 |
| | | | | matrix protein 1 | |
| IPI:IPI00323238.5 | R\hat{ }K@T*VSFS*AAEEAPVPE | 499 | Setd1a | SET domain containing 1A | 5.7891 |
| | PSTAAPLQAK@ | | | | |
| IPI:IPI00323238.5 | R\hat{ }K@T*VSFS*AAEEAPVPE | 500 | Setd1a | SET domain containing 1A | 5.6797 |
| | PSTAAPLQAK@ | | | | |
| IPI:IPI00323238.5 | R\hat{ }K@T*VSFS*AAEEAPVPE | 501 | Setd1a | SET domain containing 1A | 5.6797 |
| | PSTAAPLQAK@ | | | | |
| IPI:IPI00405470.1 | SGHSLLT*WDSAMSALSSA | 502 | D830015G02Rik | Putative uncharacterized protein | 5.6705 |
| | S*SSSCCTLR\hat{ } | | | | |
| IPI:IPI00137148.2 | R\hat{ }K@Y*GMLHTQESSSSVF | 503 | Vwa5b1 | von Willebrand factor A domain- | 5.6371 |
| | YPSQDEGLSPGSGNCAK@ | | | containing protein 5B1 | |
| IPI:IPI00660767.2 | SDSS*GGYTLSDVIQS*PPS | 504 | Ibtk | Isoform 2 of Inhibitor of Bruton | 5.5816 |
| | AGLLK@ | | | tyrosine kinase | |
| IPI:IPI00660767.2 | SDSS*GGYTLSDVIQS*PPS | 505 | Ibtk | Isoform 2 of Inhibitor of Bruton | 5.4166 |
| | AGLLK@ | | | tyrosine kinase | |
| IPI:IPI00351206.5 | GLCSGPGAGEESPAAT*LP | 506 | Pgrmc2 | Membrane-associated progesterone | 5.4066 |
| | R\hat{ }M#K@ | | | receptor component 2 | |
| IPI:IPI00117731.1 | TFWS*PELK@K@ | 507 | Erc1; | Isoform 1 of ELKS/RAB6- | 5.3901 |
| | | | LOC100048600 | interacting/CAST family member 1 | |
| IPI:IPI00115681.1 | TECGS*TGSPAS*SFHFK@ | 508 | Eef2k | Elongation factor 2 kinase | 5.3519 |
| IPI:IPI00351206.5 | GLCSGPGAGEES*PAATLP | 509 | Pgrmc2 | Membrane-associated progesterone | 5.2793 |
| | R\hat{ }M#K@ | | | receptor component 2 | |
| IPI:IPI00108454.2 | LSS*LR\hat{ }AS*TSK@SESSQK@ | 510 | rpS6 | 29 kDa protein | 5.274 |
| IPI:IPI00108454.2 | LSS*LR\hat{ }ASTS*K@SESSQK@ | 511 | rpS6 | 29 kDa protein | 5.274 |
| IPI:IPI00108454.2 | R\hat{ }LS*S*LR\hat{ } | 512 | rpS6 | 29 kDa protein | 5.2699 |
| IPI:IPI00108454.2 | RLS*S*LR | 513 | rpS6 | 29 kDa protein | 5.2699 |
| IPI:IPI00108454.2 | LS*SLR\hat{ }ASTS*K@SESSQK@ | 514 | rpS6 | 29 kDa protein | 5.257 |
| IPI:IPI00331280.1 | AALDQT*SGLPGGAAQDPG | 515 | Adamts2 | A disintegrin and metalloproteinase | 5.2222 |
| | GR\hat{ } | | | with thrombospondin motifs 2 | |
| IPI:IPI00108454.2 | RLS*S*LR | 516 | rpS6 | 29 kDa protein | 5.1769 |
| IPI:IPI00108454.2 | R\hat{ }LS*S*LR\hat{ } | 517 | rpS6 | 29 kDa protein | 5.1745 |
| IPI:IPI00127976.1 | MNILS*SQS*PLHPSTLNAVI | 518 | Grb10 | Isoform 3 of Growth factor receptor- | 5.0363 |
| | HR\hat{ } | | | bound protein 10 | |
| IPI:IPI00127976.1 | MNILSS*QS*PLHPSTLNAVI | 519 | Grb10 | Isoform 3 of Growth factor receptor- | 5.0363 |
| | HR\hat{ } | | | bound protein 10 | |
| IPI:IPI00656285.2 | SLVSPIPS*PTGTISVPNSCP | 520 | Foxk1 | Forkhead box protein K1 | 5.0164 |
| | AS*PR\hat{ } | | | | |
| IPI:IPI00461419.2 | IR\hat{ }S*S*LAR\hat{ } | 521 | Gm6988 | similar to hCG1640785 | 4.998 |
| IPI:IPI00108454.2 | R\hat{ }LS*S*LR\hat{ }ASTSK@ | 522 | rpS6 | 29 kDa protein | 4.9653 |
| IPI:IPI00127976.1 | MNILS*SQS*PLHPSTLNAVI | 523 | Grb10 | Isoform 3 of Growth factor receptor- | 4.9297 |
| | HR\hat{ } | | | bound protein 10 | |
| IPI:IPI00403938.2 | LLDPQEFT*LS*GT*QR\hat{ } | 524 | Tnc | Isoform 1 of Tenascin | 4.9074 |
| IPI:IPI00108454.2 | R\hat{ }LS*S*LR\hat{ }ASTSK@ | 525 | rpS6 | 29 kDa protein | 4.8929 |
| IPI:IPI00929786.1 | TASISSSPS*EGTPAVGS*Y | 526 | Larp1 | Isoform 1 of La-related protein 1 | 4.8902 |
| | GCT*PQSLPK@ | | | | |
| IPI:IPI00169986.4 | SLLVLR\hat{ }GT*AYT*R\hat{ } | 527 | Alkbh6 | 24 kDa protein | 4.8761 |
| IPI:IPI00127976.1 | MNILSS*QS*PLHPSTLNAVI | 528 | Grb10 | Isoform 3 of Growth factor receptor- | 4.774 |
| | HR\hat{ } | | | bound protein 10 | |
| IPI:IPI00929786.1 | T*ASISSS*PSEGTPAVGSY | 529 | Larp1 | Isoform 1 of La-related protein 1 | 4.758 |
| | GCT*PQS*LPK@ | | | | |
| IPI:IPI00929786.1 | T*ASISSS*PSEGTPAVGSY* | 530 | Larp1 | Isoform 1 of La-related protein 1 | 4.758 |
| | GCT*PQSLPK@ | | | | |
| IPI:IPI00115681.1 | TECGS*TGS*PASSFHFK@ | 531 | Eef2k | Elongation factor 2 kinase | 4.7395 |
| IPI:IPI00929786.1 | TAS*ISSS*PSEGTPAVGSY | 532 | Larp1 | Isoform 1 of La-related protein 1 | 4.7282 |
| | GCT*PQS*LPK@ | | | | |
| IPI:IPI00127976.1 | M#NILSS*QS*PLHPSTLNAV | 533 | Grb10 | Isoform 3 of Growth factor receptor- | 4.7179 |
| | IHR\hat{ } | | | bound protein 10 | |
| IPI:IPI00340860.5 | TAS*EGS*EAETPEAPK@Q | 534 | Larp7 | Isoform 1 of La-related protein 7 | 4.7122 |
| | PAK@K@ | | | | |
| IPI:IPI00340860.5 | TAS*EGS*EAETPEAPK@Q | 535 | Larp7 | Isoform 1 of La-related protein 7 | 4.7105 |
| | PAK@K@ | | | | |
| IPI:IPI00127976.1 | MNILSSQS*PLHPSTLNAVIH | 536 | Grb10 | Isoform 3 of Growth factor receptor- | 4.6623 |
| | R\hat{ } | | | bound protein 10 | |
| IPI:IPI00127976.1 | MNILSSQS*PLHPSTLNAVIH | 537 | Grb10 | Isoform 3 of Growth factor receptor- | 4.6623 |
| | R\hat{ } | | | bound protein 10 | |
| IPI:IPI00929786.1 | TASIS*SSPSEGT*PAVGSY | 538 | Larp1 | Isoform 1 of La-related protein 1 | 4.5768 |
| | GCTPQS*LPK@ | | | | |
| IPI:IPI00115681.1 | TECGS*TGSPAS*SFHFK@ | 539 | Eef2k | Elongation factor 2 kinase | 4.562 |
| IPI:IPI00553798.2 | VK@T*PEMIIQK@PK@ | 540 | Ahnak | AHNAK nucleoprotein isoform 1 | 4.557 |
| IPI:IPI00929786.1 | T*ASISSS*PSEGTPAVGSY* | 541 | Larp1 | Isoform 1 of La-related protein 1 | 4.4981 |
| | GCT*PQSLPK@ | | | | |
| IPI:IPI00929786.1 | TAS*ISSS*PSEGTPAVGSY | 542 | Larp1 | Isoform 1 of La-related protein 1 | 4.4981 |
| | GCT*PQS*LPK@ | | | | |
| IPI:IPI00320208.3 | YGPSSVEDTTGSGAADAK | 543 | Eef1b2 | Elongation factor 1-beta | 4.4765 |
| | @DDDDIDLFGS*DDEEESE | | | | |
| | EAK@K@ | | | | |
| IPI:IPI00320208.3 | YGPSSVEDTTGSGAADAKD | 544 | Eef1b2 | Elongation factor 1-beta | 4.4765 |
| | DDDIDLFGS*DDEEESEEAKK | | | | |
| IPI:IPI00474916.3 | AVVPFLGVGFSSLDMS*LCV | 545 | Qsox2 | Isoform 3 of Sulfhydryl oxidase 2 | 4.4747 |
| | VLY*VASS*LFLM#IMYFFFR | | | | |
| | \hat{ }VR\hat{ } | | | | |
| IPI:IPI00399953.1 | K@FS*APGQLCVPMTSNLG | 546 | Wnk1 | Serine/threonine-protein kinase WNK1 | 4.3426 |
| | GSTPISAASATSLGHFTK@ | | | | |
| IPI:IPI00654415.2 | MT*S*T*DYS*LSGTCGM#D | 547 | Megf11 | Isoform 4 of Multiple epidermal growth | 4.325 |
| | R\hat{ } | | | factor-like domains 11 | |
| IPI:IPI00660767.2 | SDS*SGGYTLSDVIQS*PPS | 548 | Ibtk | Isoform 2 of Inhibitor of Bruton | 4.2681 |
| | AGLLK@ | | | tyrosine kinase | |
| IPI:IPI00660767.2 | K@R\hat{ }SDSSGGYT*LSDVIQS | 549 | Ibtk | Isoform 2 of Inhibitor of Bruton | 4.2613 |
| | *PPSAGLLK@ | | | tyrosine kinase | |
| IPI:IPI00127976.1 | MNILSSQS*PLHPSTLNAVIH | 550 | Grb10 | Isoform 3 of Growth factor receptor- | 4.2564 |
| | R\hat{ } | | | bound protein 10 | |
| IPI:IPI00127976.1 | MNILSSQSPLHPS*TLNAVIH | 551 | Grb10 | Isoform 3 of Growth factor receptor- | 4.2564 |
| | R\hat{ } | | | bound protein 10 | |
| IPI:IPI00127976.1 | M#NILSSQS*PLHPSTLNAVI | 552 | Grb10 | Isoform 3 of Growth factor receptor- | 4.2332 |
| | HR\hat{ } | | | bound protein 10 | |
| IPI:IPI00313653.2 | QFCQEGQPHVLEALS*PPQ | 553 | Maf1 | Repressor of RNA polymerase III | 4.2077 |
| | TSGLS*PSR\hat{ } | | | transcription MAF1 homolog | |
| IPI:IPI00929786.1 | TAS*ISSS*PSEGTPAVGSY | 554 | Larp1 | Isoform 1 of La-related protein 1 | 4.18 |
| | GCT*PQS*LPK@ | | | | |
| IPI:IPI00127976.1 | M#NILSSQS*PLHPSTLNAVI | 555 | Grb10 | Isoform 3 of Growth factor receptor- | 4.1504 |
| | HR\hat{ } | | | bound protein 10 | |
| IPI:IPI00127976.1 | M#NILSSQS*PLHPSTLNAVI | 556 | Grb10 | Isoform 3 of Growth factor receptor- | 4.1504 |
| | HR\hat{ } | | | bound protein 10 | |
| IPI:IPI00122594.4 | EVS*VSS*VTEEPK@LDSSQ | 557 | Ahctf1 | AT-hook-containing transcription | 4.144 |
| | LPLQTGLDVPAT*PR\hat{ } | | | factor 1 | |
| IPI:IPI00127976.1 | MNILSSQS*PLHPSTLNAVIH | 558 | Grb10 | Isoform 3 of Growth factor receptor- | 4.133 |
| | R\hat{ } | | | bound protein 10 | |
| IPI:IPI00127976.1 | MNILSSQS*PLHPSTLNAVIH | 559 | Grb10 | Isoform 3 of Growth factor receptor- | 4.133 |
| | R\hat{ } | | | bound protein 10 | |
| IPI:IPI00109318.1 | R\hat{ }NS*PMAQT*PPCHLPNIP | 560 | Eif4ebp2 | Eukaryotic translation initiation | 4.0914 |
| | GVTSPGALIEDSK@ | | | factor 4E-binding protein 2 | |
| IPI:IPI00109318.1 | R\hat{ }NS*PMAQT*PPCHLPNIP | 561 | Eif4ebp2 | Eukaryotic translation initiation | 4.0914 |
| | GVTSPGALIEDSK@ | | | factor 4E-binding protein 2 | |
| IPI:IPI00122521.1 | K@DELSDWS*LAGEDDR\hat{ }E | 562 | Fxr1 | Isoform E of Fragile X mental | 4.0773 |
| | TR\hat{ } | | | retardation syndrome-related protein 1 | |
| IPI:IPI00127976.1 | MNILSS*QSPLHPSTLNAV | 563 | Grb10 | Isoform 3 of Growth factor receptor- | 4.0585 |
| | IHR | | | bound protein 10 | |
| IPI:IPI00127976.1 | MNILS*SQS*PLHPSTLNAVI | 564 | Grb10 | Isoform 3 of Growth factor receptor- | 4.0417 |
| | HR\hat{ } | | | bound protein 10 | |
| IPI:IPI00313653.2 | QFCQEGQPHVLEALS*PPQ | 565 | Maf1 | Repressor of RNA polymerase III | 4.0213 |
| | TSGLS*PSR\hat{ } | | | transcription MAF1 homolog | |
| IPI:IPI00127976.1 | MNILSS*QSPLHPSTLNAV | 566 | Grb10 | Isoform 3 of Growth factor receptor- | 3.9734 |
| | IHR | | | bound protein 10 | |
| IPI:IPI00127976.1 | MNILSSQS*PLHPSTLNAVIH | 567 | Grb10 | Isoform 3 of Growth factor receptor- | 3.9734 |
| | R\hat{ } | | | bound protein 10 | |
| IPI:IPI00127976.1 | MNILSSQS*PLHPSTLNAVIH | 568 | Grb10 | Isoform 3 of Growth factor receptor- | 3.9734 |
| | R\hat{ } | | | bound protein 10 | |
| IPI:IPI00127976.1 | MNILSS*QSPLHPSTLNAV | 569 | Grb10 | Isoform 3 of Growth factor receptor- | 3.9734 |
| | IHR | | | bound protein 10 | |
| IPI:IPI00120691.3 | QADSET*K@EIITEEPS*EEE | 570 | Ddx21 | Nucleolar RNA helicase 2 | 3.9589 |
| | ADMPK@PK@ | | | | |
| IPI:IPI00226441.2 | LHYT*PPLQS*PIT*DGDPLL | 571 | Lin9 | Isoform 2 of Lin-9 homolog | 3.8536 |
| | GQS*PWR\hat{ } | | | | |
| IPI:IPI00127976.1 | MNILSSQS*PLHPSTLNAVIH | 572 | Grb10 | Isoform 3 of Growth factor receptor- | 3.8383 |
| | R\hat{ } | | | bound protein 10 | |
| IPI:IPI00127976.1 | MNILSSQS*PLHPSTLNAVIH | 573 | Grb10 | Isoform 3 of Growth factor receptor- | 3.8383 |
| | R\hat{ } | | | bound protein 10 | |
| IPI:IPI00656285.2 | SSGLQTPECLS*REGS*PIP | 574 | Foxk1 | Forkhead box protein K1 | 3.7948 |
| | HDPDLGSK | | | | |
| IPI:IPI00656285.2 | SSGLQTPECLS*R\hat{ }EGS*PIP | 575 | Foxk1 | Forkhead box protein K1 | 3.7948 |
| | HDPDLGSK@ | | | | |
| IPI:IPI00468516.3 | SHILESVPTLPGS*VEAGVS | 576 | D6Wsu116e | Isoform 1 of Protein FAM21 | 3.7932 |
| | FDLPAQADTLHSANK@ | | | | |
| IPI:IPI00751009.1 | TSEFPTPLFSGPLEPVACGS | 577 | Srpk2 | serine/arginine-rich protein-specific | 3.7653 |
| | VISEGSPLTEQEESSPSHDR | | | kinase 2 | |
| | \hat{ }S*R\hat{ } | | | | |
| IPI:IPI00929786.1 | TASISSSPS*EGTPAVGSYG | 578 | Larp1 | Isoform 1 of La-related protein 1 | 3.756 |
| | CT*PQS*LPK@ | | | | |
| IPI:IPI00929786.1 | TASISSSPS*EGTPAVGSY* | 579 | Larp1 | Isoform 1 of La-related protein 1 | 3.756 |
| | GCT*PQSLPK@ | | | | |
| IPI:IPI00656285.2 | SSGLQTPECLS*R\hat{ }EGS*PIP | 580 | Foxk1 | Forkhead box protein K1 | 3.7214 |
| | HDPDLGSK@ | | | | |
| IPI:IPI00400017.2 | TQS*GNFNTDAPGMAEFR\hat{ } | 581 | Ppfibp2 | Isoform 4 of Liprin-beta-2 | 3.6603 |
| IPI:IPI00660767.2 | SDSS*GGYTLSDVIQS*PPS | 582 | Ibtk | Isoform 2 of Inhibitor of Bruton | 3.6519 |
| | AGLLK@ | | | tyrosine kinase | |
| IPI:IPI00116442.1 | S*EGLSLER\hat{ } | 583 | Hdgfrp2 | Isoform 3 of Hepatoma-derived growth | 3.6501 |
| | | | | factor-related protein 2 | |
| IPI:IPI00379844.4 | TAS*EGDGGAAGGAGTAG | 584 | Irs2 | Insulin receptor substrate 2 | 3.6492 |
| | GR\hat{ }PMSVAGS*PLS*PGPVR\hat{ } | | | | |
| IPI:IPI00929786.1 | T*ASISSS*PSEGTPAVGS*Y | 585 | Larp1 | Isoform 1 of La-related protein 1 | 3.6217 |
| | GCTPQSLPK@ | | | | |
| IPI:IPI00929786.1 | T*ASISSS*PSEGTPAVGS*Y | 586 | Larp1 | Isoform 1 of La-related protein 1 | 3.6217 |
| | GCTPQSLPK@ | | | | |
| IPI:IPI00116442.1 | R\hat{ }S*EGLSLER\hat{ } | 587 | Hdgfrp2 | Isoform 3 of Hepatoma-derived growth | 3.6142 |
| | | | | factor-related protein 2 | |
| IPI:IPI00656285.2 | SLVS*PIPSPTGT*ISVPNSC | 588 | Foxk1 | Forkhead box protein K1 | 3.6065 |
| | PAS*PR\hat{ } | | | | |
| IPI:IPI00656285.2 | SLVS*PIPS*PTGTISVPNSC | 589 | Foxk1 | Forkhead box protein K1 | 3.6065 |
| | PAS*PR\hat{ } | | | | |
| IPI:IPI00656285.2 | SLVSPIPSPT*GTISVPNSCP | 590 | Foxk1 | Forkhead box protein K1 | 3.605 |
| | AS*PR\hat{ } | | | | |
| IPI:IPI00654417.1 | HSS*PPLTVK | 591 | Tinf2 | Putative uncharacterized protein | 3.5562 |
| IPI:IPI00830829.1 | R\hat{ }R\hat{ }SGEQIT*SS*PVS*PK@ | 592 | Hisppd1 | 140 kDa protein | 3.5492 |
| IPI:IPI00118875.4 | GATPAEDDEDKDIDLFGS*D | 593 | Eef1d | eukaryotic translation elongation | 3.5469 |
| | EEEEDKEAAR | | | factor 1 delta isoform a | |
| IPI:IPI00118875.4 | GATPAEDDEDKDIDLFGS*D | 594 | Eef1d | eukaryotic translation elongation | 3.5469 |
| | EEEEDKEAAR | | | factor 1 delta isoform a | |
| IPI:IPI00169888.3 | SQDVAIS*PQQQQCSK@S* | 595 | Edc3 | Enhancer of mRNA-decapping protein 3 | 3.5277 |
| | YVDR\hat{ } | | | | |
| IPI:IPI00134029.8 | VS*SS*VS*VGPSM#SGET*L | 596 | Aim1l | Absent in melanoma 1-like | 3.5092 |
| | PR\hat{ } | | | | |
| IPI:IPI00654417.1 | HSS*PPLTVK | 597 | Tinf2 | Putative uncharacterized protein | 3.4997 |
| IPI:IPI00676574.2 | RVS*TDLPEGQDVYTAACN | 598 | Herc1 | hect (homologous to the E6-AP | 3.4866 |
| | SVIHR | | | (UBE3A) carboxyl terminus) domain | |
| | | | | and RCC1 (CHC1)-like domain (RLD) 1 | |
| IPI:IPI00762234.2 | SGDPR\hat{ }S*CEEES*DPEPDP | 599 | Fbxw9 | F-box and WD-40 domainprotein 9 | 3.4479 |
| | DPDTQAEAYVAR\hat{ } | | | | |
| IPI:IPI00660767.2 | VDTAASSSWLAGS*CS*PVS | 600 | Ibtk | Isoform 2 of Inhibitor of Bruton | 3.398 |
| | PPVVDLR\hat{ } | | | tyrosine kinase | |
| IPI:IPI00169888.3 | SQDVAIS*PQQQQCS*K@S | 601 | Edc3 | Enhancer of mRNA-decapping protein 3 | 3.3665 |
| | YVDR\hat{ } | | | | |
| IPI:IPI00169888.3 | SQDVAISPQQQQCS*K@SY | 602 | Edc3 | Enhancer of mRNA-decapping protein 3 | 3.3665 |
| | *VDR\hat{ } | | | | |
| IPI:IPI00122521.1 | K@DELSDWS*LAGEDDR\hat{ }E | 603 | Fxr1 | Isoform E of Fragile X mental | 3.3379 |
| | TR\hat{ } | | | retardation syndrome-related protein 1 | |
| IPI:IPI00761443.2 | RSS*AGS*LESNVEGSIISS* | 604 | Iqsec1 | IQ motif and Sec7 domain 1 isoform b | 3.3179 |
| | PHMR | | | | |
| IPI:IPI00761443.2 | R\hat{ }S*SAGS*LESNVEGSIISS* | 605 | Iqsec1 | IQ motif and Sec7 domain 1 isoform b | 3.3179 |
| | PHMR\hat{ } | | | | |
| IPI:IPI00828461.1 | GPPDFS*S*DEER\hat{ }EPTPVL | 606 | Tmpo | thymopoietin isoform delta | 3.3038 |
| | GSGASVGR\hat{ } | | | | |
| IPI:IPI00828461.1 | GPPDFS*S*DEER\hat{ }EPTPVL | 607 | Tmpo | thymopoietin isoform delta | 3.3038 |
| | GSGASVGR\hat{ } | | | | |
| IPI:IPI00126317.1 | NAS*TS*FQELEDK@K@EL | 608 | Dnajc2 | DnaJ homolog subfamily C member 2 | 3.2768 |
| | SEESEDEELQLEEFPMLK@ | | | | |
| IPI:IPI00227934.3 | TSASCS*PAPES*PMSSSES | 609 | Cux1 | cut-like homeobox 1 isoform a | 3.1887 |
| | VK@ | | | | |
| IPI:IPI00116442.1 | S*EGLSLER\hat{ } | 610 | Hdgfrp2 | Isoform 3 of Hepatoma-derived growth | 3.1751 |
| | | | | factor-related protein 2 | |
| IPI:IPI00468516.3 | SHILESVPTLPGS*VEAGVS | 611 | D6Wsu116e | Isoform 1 of Protein FAM21 | 3.1635 |
| | FDLPAQADTLHSANK@ | | | | |
| IPI:IPI00468516.3 | SHILESVPTLPGS*VEAGVS | 612 | D6Wsu116e | Isoform 1 of Protein FAM21 | 3.1635 |
| | FDLPAQADTLHSANK@ | | | | |
| IPI:IPI00762234.2 | SGDPR\hat{ }S*CEEES*DPEPDP | 613 | Fbxw9 | F-box and WD-40 domain protein 9 | 3.1508 |
| | DPDTQAEAYVAR\hat{ } | | | | |
| IPI:IPI00320208.3 | YGPSSVEDTTGSGAADAKD | 614 | Eef1b2 | Elongation factor 1-beta | 3.1436 |
| | DDDIDLFGS*DDEEESEEAKK | | | | |
| IPI:IPI00320594.5 | SQPHSSTSNQETS*DS*EM | 615 | Ranbp10 | Ran-binding protein 10 | 3.1377 |
| | EMEAEHYPNGVLESVSTR\hat{ } | | | | |
| IPI:IPI00808277.2 | S*APASPNHAGVLSAHSSG | 616 | Foxk2 | Isoform 1 of Forkhead box protein K2 | 3.1204 |
| | AQTPES*LSR\hat{ }EGS*PAPLE | | | | |
| | PEPGASQPK@ | | | | |
| IPI:IPI00808277.2 | SAPAS*PNHAGVLSAHSSG | 617 | Foxk2 | Isoform 1 of Forkhead box protein K2 | 3.1105 |
| | AQTPES*LSR\hat{ }EGS*PAPLE | | | | |
| | PEPGASQPK@ | | | | |
| IPI:IPI00753321.2 | S*VSETSEDK@K@DEES*D | 618 | Bod1l | biorientation of chromosomes in cell | 3.106 |
| | EEEEEEEEEEPLGATTR\hat{ } | | | division 1-like | |
| IPI:IPI00420464.3 | SNT*PS*PLNLSSTSSK@ | 619 | Zeb2 | Zinc finger E-box-binding homeobox 2 | 3.0996 |
| IPI:IPI00116442.1 | S*EGLSLER\hat{ } | 620 | Hdgfrp2 | Isoform 3 of Hepatoma-derived growth | 3.0974 |
| | | | | factor-related protein 2 | |
| IPI:IPI00808277.2 | SAPAS*PNHAGVLSAHSSG | 621 | Foxk2 | Isoform 1 of Forkhead box protein K2 | 3.0877 |
| | AQT*PES*LSR\hat{ } | | | | |
| IPI:IPI00830829.1 | R\hat{ }R\hat{ }S*GEQITSS*PVS*PK@ | 622 | Hisppd1 | 140 kDa protein | 3.0712 |
| IPI:IPI00117932.2 | S*PPVQPHTPVTISLGTAPS | 623 | Sin3a | Isoform 1 of Paired amphipathic helix | 3.0565 |
| | LQNNQPVEFNHAINYVNK@ | | | protein Sin3a | |
| IPI:IPI00117932.2 | S*PPVQPHTPVTISLGTAPS | 624 | Sin3a | Isoform 1 of Paired amphipathic helix | 3.0565 |
| | LQNNQPVEFNHAINYVNK@ | | | protein Sin3a | |
| IPI:IPI00320594.5 | SQPHSSTSNQETS*DS*EM | 625 | Ranbp10 | Ran-binding protein 10 | 3.0328 |
| | EMEAEHYPNGVLESVSTR\hat{ } | | | | |
| IPI:IPI00227934.3 | TS*ASCSPAPES*PMSSSES | 626 | Cux1 | cut-like homeobox 1 isoform a | 3.0118 |
| | VK@ | | | | |
| IPI:IPI00380817.6 | GR\hat{ }SS*ESSCGLDGDYEDA | 627 | Bcr | Breakpoint cluster region protein | 3.0087 |
| | ELNPR\hat{ } | | | | |
| IPI:IPI00656285.2 | SLVSPIPS*PTGTISVPNSCP | 628 | Foxk1 | Forkhead box protein K1 | 2.9994 |
| | AS*PR\hat{ } | | | | |
| IPI:IPI00656285.2 | SLVS*PIPS*PTGTISVPNSC | 629 | Foxk1 | Forkhead box protein K1 | 2.9989 |
| | PAS*PR\hat{ } | | | | |
| IPI:IPI00127976.1 | MNILS*SQS*PLHPSTLNAVI | 630 | Grb10 | Isoform 3 of Growth factor receptor- | 2.9784 |
| | HR\hat{ } | | | bound protein 10 | |
| IPI:IPI00551454.3 | ER\hat{ }QES*ESEQELVNK@ | 631 | Pdcd11 | Protein RRP5 homolog | 2.9603 |
| IPI:IPI00226155.3 | VSALEEDMDDVES*S*EEEE | 632 | Prpf38a | Isoform 1 of Pre-mRNA-splicing factor | 2.9547 |
| | EEDEKLER | | | 38A | |
| IPI:IPI00753321.2 | SVSETS*EDK@K@DEES*D | 633 | Bod1l | biorientation of chromosomes in cell | 2.9525 |
| | EEEEEEEEEEPLGATTR\hat{ } | | | division 1-like | |
| IPI:IPI00753321.2 | SVSET*SEDK@K@DEES*D | 634 | Bod1l | biorientation of chromosomes in cell | 2.9525 |
| | EEEEEEEEEEPLGATTR\hat{ } | | | division 1-like | |
| IPI:IPI00108454.2 | LSS*LR\hat{ }ASTS*K@S*ESSQ | 635 | — | 29 kDa protein | 2.9394 |
| | K@ | | | | |
| IPI:IPI00553798.2 | HR\hat{ }SNS*FS*DER\hat{ }EFSAPS* | 636 | Ahnak | AHNAK nucleoprotein isoform 1 | 2.9368 |
| | TPTGTLEFAGGDAK@ | | | | |
| IPI:IPI00551454.3 | ER\hat{ }QES*ESEQELVNK@ | 637 | Pdcd11 | Protein RRP5 homolog | 2.9308 |
| IPI:IPI00468516.3 | SHILESVPTLPGS*VEAGVS | 638 | D6Wsu116e | Isoform 1 of Protein FAM21 | 2.9286 |
| | FDLPAQADTLHSANK@ | | | | |
| IPI:IPI00420464.3 | SNT*PS*PLNLSSTSSK@ | 639 | Zeb2 | Zinc finger E-box-binding homeobox 2 | 2.9204 |
| IPI:IPI00656285.2 | SLVS*PIPS*PTGTISVPNSC | 640 | Foxk1 | Forkhead box protein K1 | 2.8837 |
| | PAS*PR\hat{ } | | | | |
| IPI:IPI00330773.3 | K@MLLASTSSDDFDR\hat{ }AS* | 641 | Phldb2 | Isoform 1 of Pleckstrin homology-like | 2.8699 |
| | Y*SGTSPSHSFISGEPDR\hat{ } | | | domain family B member 2 | |
| IPI:IPI00551454.3 | ER\hat{ }QES*ESEQELVNK@ | 642 | Pdcd11 | Protein RRP5 homolog | 2.8488 |
| IPI:IPI00656285.2 | SLVS*PIPSPT*GTISVPN | 643 | Foxk1 | Forkhead box protein K1 | 2.818 |
| | S*CPASPR\hat{ } | | | | |
| IPI:IPI00660767.2 | VDTAASSSWLAGS*CS*PVS | 644 | Ibtk | Isoform 2 of Inhibitor of Bruton | 2.8109 |
| | PPVVDLR\hat{ } | | | tyrosine kinase | |
| IPI:IPI00656285.2 | SLVS*PIPS*PTGTISVPNSC | 645 | Foxk1 | Forkhead box protein K1 | 2.8019 |
| | PAS*PR\hat{ } | | | | |
| IPI:IPI00656285.2 | SLVS*PIPS*PTGTISVPNSC | 646 | Foxk1 | Forkhead box protein K1 | 2.8019 |
| | PAS*PR\hat{ } | | | | |
| IPI:IPI00656285.2 | SLVSPIPSPT*GT*ISVPNSC | 647 | Foxk1 | Forkhead box protein K1 | 2.8019 |
| | PAS*PR | | | | |
| IPI:IPI00107958.1 | TSDIFGS*PVTATAPLAHPN | 648 | Hn1l | Hematological and neurological | 2.7751 |
| | K@PK@ | | | expressed 1-like protein | |
| IPI:IPI00129298.1 | EIDVLEFGESAPAASKENSA | 649 | Palm | Isoform 1 of Paralemmin | 2.7684 |
| | APS*PGRPQSASPAKEEQK | | | | |
| IPI:IPI00320208.3 | YGPSSVEDTTGSGAADAK | 650 | Eef1b2 | Elongation factor 1-beta | 2.7577 |
| | @DDDDIDLFGS*DDEEESE | | | | |
| | EAK@K@ | | | | |
| IPI:IPI00929786.1 | TASISSS*PSEGT*PAVGSY | 651 | Larp1 | Isoform 1 of La-related protein 1 | 2.7577 |
| | GCT*PQS*LPK@ | | | | |
| IPI:IPI00377615.2 | R\hat{ }SS*R\hat{ }S*FSLDEPPLFIPD | 652 | Phf3 | PHD finger protein 3 | 2.7452 |
| | NIATVK@ | | | | |
| IPI:IPI00113563.3 | YMEDST*YY*K@ASK@ | 653 | Ptk2 | Isoform 1 of Focal adhesion kinase 1 | 2.7394 |
| IPI:IPI00553283.1 | MMPS*PSDSSR\hat{ } | 654 | 1110013L07Rik | Putative uncharacterized protein | 2.7037 |
| IPI:IPI00314502.5 | VHGLPTTSPS*GVNMAELA | 655 | Tcfeb | Transcription factor EB | 2.6958 |
| | QQVVK@ | | | | |
| IPI:IPI00314502.5 | VHGLPTTSPS*GVNMAELA | 656 | Tcfeb | Transcription factor EB | 2.6958 |
| | QQVVK@ | | | | |
| IPI:IPI00122594.4 | EVS*VSS*VTEEPK@LDSSQ | 657 | Ahctf1 | AT-hook-containing transcription | 2.6674 |
| | LPLQTGLDVPAT*PR\hat{ } | | | factor 1 | |
| IPI:IPI00377615.2 | S*S*R\hat{ }SFSLDEPPLFIPDNIA | 658 | Phf3 | PHD finger protein 3 | 2.6537 |
| | TVK@K@ | | | | |
| IPI:IPI00468516.3 | SHILESVPTLPGS*VEAGVS | 659 | D6Wsu116e | Isoform 1 of Protein FAM21 | 2.6436 |
| | FDLPAQADTLHSANK@ | | | | |
| IPI:IPI00122521.1 | SSISSVLK@DPDSNPYSLLD | 660 | Fxr1 | Isoform E of Fragile X mental | 2.618 |
| | NTES*DQTADT*DAS*ESHH | | | retardation syndrome-related protein 1 | |
| | STNR\hat{ } | | | | |
| IPI:IPI00625723.2 | TGTGSPFAGNS*PAR\hat{ }EGE | 661 | Zc3h4 | Isoform 2 of Zinc finger CCCH domain- | 2.5583 |
| | QDAGSLK@DVFK@ | | | containing protein 4 | |
| IPI:IPI00625723.2 | TGTGSPFAGNS*PAR\hat{ }EGE | 662 | Zc3h4 | Isoform 2 of Zinc finger CCCH domain- | 2.5583 |
| | QDAGSLK@DVFK@ | | | containing protein 4 | |
| IPI:IPI00122559.3 | EIQNGTLR\hat{ }ES*DSEHVPR\hat{ } | 663 | Ktn1 | isoform 1 of Kinectin | 2.5547 |
| IPI:IPI00136379.1 | GGGSAAAAAAAAASGGGV | 664 | Pbx2 | Pre-B-cell leukemia transcription | 2.554 |
| | S*PDNSIEHSDYR\hat{ } | | factor 2 | | |
| IPI:IPI00330246.2 | SGPLPSSSGSSSSSSQLSV | 665 | Phldb1 | Isoform 2 of Pleckstrin homology-like | 2.5309 |
| | AT*LGR\hat{ }SPS*PK@ | | | domain family B member 1 | |
| IPI:IPI00330246.2 | SGPLPSSSGSSSSSSQLSV | 666 | Phldb1 | Isoform 2 of Pleckstrin homology-like | 2.5309 |
| | AT*LGR\hat{ }SPS*PK@ | | | domain family B member 1 | |
| IPI:IPI00377615.2 | S*S*R\hat{ }SFSLDEPPLFIPDNIA | 667 | Phf3 | PHD finger protein 3 | 2.5121 |
| | TVK@K@ | | | | |
| IPI:IPI00125505.2 | TTGNSHWTLEAPFSSS*CA | 668 | Cdgap | Cdc42 GTPase-activating protein | 2.4733 |
| | NLETER\hat{ } | | | | |
| IPI:IPI00551454.3 | ER\hat{ }QES*ESEQELVNK@ | 669 | Pdcd11 | Protein RRP5 homolog | 2.4392 |
| IPI:IPI00320594.5 | SQPHSSTSNQETS*DS*EM | 670 | Ranbp10 | Ran-binding protein 10 | 2.4384 |
| | EMEAEHYPNGVLESVSTR\hat{ } | | | | |
| IPI:IPI00126317.1 | NAS*TS*FQELEDK@K@EL | 671 | Dnajc2 | DnaJ homolog subfamily C member 2 | 2.438 |
| | SEESEDEELQLEEFPMLK@ | | | | |
| IPI:IPI00129276.2 | LES*LNIQR\hat{ } | 672 | Eif3a | Eukaryotic translation initiation | 2.429 |
| | | | | factor 3 subunit A | |
| IPI:IPI00553798.2 | SS*EVVLS*GDDEDYQR\hat{ } | 673 | Ahnak | AHNAK nucleoprotein isoform 1 | 2.4187 |
| IPI:IPI00226750.2 | T*S*S*TCSNESLNAGGTPV | 674 | Tbc1d4 | 140 kDa protein | 2.4185 |
| | TPR\hat{ } | | | | |
| IPI:IPI00377615.2 | R\hat{ }SSR\hat{ }S*FS*LDEPPLFIPD | 675 | Phf3 | PHD finger protein 3 | 2.409 |
| | NIATVK@ | | | | |
| IPI:IPI00377615.2 | R\hat{ }SSR\hat{ }S*FS*LDEPPLFIPD | 676 | Phf3 | PHD finger protein 3 | 2.409 |
| | NIATVK@ | | | | |
| IPI:IPI00114227.7 | SIST*CGPLDK@DDPGGQK@ | 677 | Dennd4a | hypothetical protein LOC102442 | 2.3733 |
| IPI:IPI00339693.1 | LGDSELALVCSQR\hat{ }PAS*LS | 678 | Wdr91 | WD repeat-containing protein 91 | 2.3532 |
| | QSPR\hat{ } | | | | |
| IPI:IPI00137166.1 | SR\hat{ }DAT*PPVS*PINMEDQE | 679 | Junb | Transcription factor jun-B | 2.3444 |
| | R\hat{ } | | | | |
| IPI:IPI00751009.1 | TVS*ASS*TGDLPK@ | 680 | Srpk2 | serine/arginine-rich protein-specific | 2.3444 |
| | | | | kinase 2 | |
| IPI:IPI00751009.1 | TVS*ASS*TGDLPK@ | 681 | Srpk2 | serine/arginine-rich protein-specific | 2.3444 |
| | | | | kinase 2 | |
| IPI:IPI00751009.1 | TVS*ASS*TGDLPK | 682 | Srpk2 | serine/arginine-rich protein-specific | 2.3444 |
| | | | | kinase 2 | |
| IPI:IPI00226750.2 | TSST*CS*NESLNAGGTPVT | 683 | Tbc1d4 | 140 kDa protein | 2.3429 |
| | PR\hat{ } | | | | |
| IPI:IPI00221581.1 | SR\hat{ }T*GS*ESSQTGASATSG | 684 | Eif4b | Eukaryotic translation initiation | 2.3268 |
| | R\hat{ } | | | factor 4B | |
| IPI:IPI00122521.1 | SSISSVLK@DPDSNPYSLLD | 685 | Fxr1 | Isoform E of Fragile X mental | 2.3266 |
| | NTES*DQT*ADT*DASESHH | | | retardation syndrome-related protein 1 | |
| | STNR\hat{ } | | | | |
| IPI:IPI00116442.1 | K@R\hat{ }S*EGLS*LER\hat{ } | 686 | Hdgfrp2 | Isoform 3 of Hepatoma-derived growth | 2.3042 |
| | | | | factor-related protein 2 | |
| IPI:IPI00828461.1 | GPPDFS*S*DEER\hat{ }EPT*PVL | 687 | Tmpo | thymopoietin isoform delta | 2.3011 |
| | GS*GASVGR\hat{ } | | | | |
| IPI:IPI00463493.1 | S*ATDADMVNSGWLVVGK | 688 | Gbf1 | Golgi-specific brefeldin A-resistance | 2.294 |
| | | | | factor 1 | |
| IPI:IPI00129276.2 | LES*LNIQR\hat{ } | 689 | Eif3a | Eukaryotic translation initiation | 2.2772 |
| | | | | factor 3 subunit A | |
| IPI:IPI00751009.1 | TVS*ASS*TGDLPK@ | 690 | Srpk2 | serine/arginine-rich protein-specific | 2.2686 |
| | | | | kinase 2 | |
| IPI:IPI00137166.1 | SR\hat{ }DAT*PPVS*PINMEDQE | 691 | Junb | Transcription factor jun-B | 2.2666 |
| | R\hat{ } | | | | |
| IPI:IPI00221581.1 | SR\hat{ }TGS*ESS*QTGASATSG | 692 | Eif4b | Eukaryotic translation initiation | 2.2646 |
| | R\hat{ } | | | factor 4B | |
| IPI:IPI00221581.1 | SR\hat{ }TGS*ESS*QTGASATSG | 693 | Eif4b | Eukaryotic translation initiation | 2.2646 |
| | R\hat{ } | | | factor 4B | |
| IPI:IPI00221581.1 | SRT*GS*ESSQTGASATSGR | 694 | Eif4b | Eukaryotic translation initiation | 2.2646 |
| | | | | factor 4B | |
| IPI:IPI00268688.3 | TSS*S*ETEEK@K@TEK@P | 695 | Cd2ap | CD2-associated protein | 2.2567 |
| | LILQPLGSR\hat{ } | | | | |
| IPI:IPI00268688.3 | TSS*S*ETEEKKTEKPLILQP | 696 | Cd2ap | CD2-associated protein | 2.2567 |
| | LGSR | | | | |
| IPI:IPI00226750.2 | TSST*CS*NES*LNAGGTPV | 697 | Tbc1d4 | 140 kDa protein | 2.2548 |
| | TPR\hat{ } | | | | |
| IPI:IPI00221581.1 | SRT*GS*ESSQTGASATSGR | 698 | Eif4b | Eukaryotic translation initiation | 2.2395 |
| | | | | factor 4B | |
| IPI:IPI00221581.1 | SR\hat{ }TGS*ESS*QTGASATSG | 699 | Eif4b | Eukaryotic translation initiation | 2.2395 |
| | R\hat{ } | | | factor 4B | |
| IPI:IPI00122594.4 | EVS*VSS*VTEEPK@LDSSQ | 700 | Ahctf1 | AT-hook-containing transcription | 2.2291 |
| | LPLQTGLDVPATPR\hat{ } | | | factor 1 | |
| IPI:IPI00122594.4 | EVSVS*S*VTEEPKLDSSQL | 701 | Ahctf1 | AT-hook-containing transcription | 2.2291 |
| | PLQTGLDVPATPR | | | factor 1 | |
| IPI:IPI00676574.2 | RVST*DLPEGQDVYTAACN | 702 | Herc1 | hect (homologous to the E6-AP | 2.2125 |
| | SVIHR | | | (UBE3A) carboxyl terminus) domain | |
| | | | | and RCC1 (CHC1)-like domain (RLD) 1 | |
| IPI:IPI00268688.3 | TSS*S*ETEEK@K@TEK@P | 703 | Cd2ap | CD2-associated protein | 2.1992 |
| | LILQPLGSR\hat{ } | | | | |
| IPI:IPI00320905.7 | LGEQGPEPGPT*PPQTPT*P | 704 | Arhgap17 | Isoform 1 of Rho GTPase-activating | 2.1798 |
| | PS*TPPLAK | | | protein 17 | |
| IPI:IPI00108454.2 | LSSLRAS*TS*KSES*S*QK | 705 | — | 29 kDa protein | 2.1655 |
| IPI:IPI00929786.1 | TASIS*S*SPSEGTPAVGSY | 706 | Larp1 | Isoform 1 of La-related protein 1 | 2.1557 |
| | GCT*PQSLPK@ | | | | |
| IPI:IPI00381495.5 | TVSSPIPYTPSPSSSR\hat{ }PIS* | 707 | Ccdc6 | coiled-coil domain containing 6 | 2.1555 |
| | PGLSY*ASHTVGFTPPTSLT | | | | |
| | R\hat{ } | | | | |
| IPI:IPI00221581.1 | TGS*ESS*QTGASATSGR\hat{ } | 708 | Eif4b | Eukaryotic translation initiation | 2.1437 |
| | | | | factor 4B | |
| IPI:IPI00221581.1 | TGS*ESS*QTGASATSGR\hat{ } | 709 | Eif4b | Eukaryotic translation initiation | 2.1437 |
| | | | | factor 4B | |
| IPI:IPI00137166.1 | SR\hat{ }DAT*PPVS*PINMEDQE | 710 | Junb | Transcription factor jun-B | 2.1419 |
| | R\hat{ } | | | | |
| IPI:IPI00929786.1 | S*LPTTVPES*PNYR\hat{ } | 711 | Larp1 | Isoform 1 of La-related protein 1 | 2.1397 |
| IPI:IPI00929786.1 | S*LPTTVPESPNY*R | 712 | Larp1 | Isoform 1 of La-related protein 1 | 2.1397 |
| IPI:IPI00406045.3 | SESSAGICVPLSTS*PQVSE | 713 | Pik3r4 | Phosphoinositide 3-kinase regulatory | 2.1394 |
| | AAHIPSK@K@PVIPVVSST | | | subunit 4 | |
| | VLPSTYQIR\hat{ } | | | | |
| IPI:IPI00122594.4 | ER\hat{ }EVS*VS*SVTEEPK@LD | 714 | Ahctf1 | AT-hook-containing transcription | 2.1312 |
| | SSQLPLQTGLDVPATPR\hat{ } | | | factor 1 | |
| IPI:IPI00929786.1 | S*LPTTVPES*PNYR\hat{ } | 715 | Larp1 | Isoform 1 of La-related protein 1 | 2.1207 |
| IPI:IPI00929786.1 | S*LPTTVPES*PNYR | 716 | Larp1 | Isoform 1 of La-related protein 1 | 2.1207 |
| IPI:IPI00929786.1 | SLPT*TVPES*PNYR\hat{ } | 717 | Larp1 | Isoform 1 of La-related protein 1 | 2.1207 |
| IPI:IPI00929786.1 | S*LPTTVPES*PNYR | 718 | Larp1 | Isoform 1 of La-related protein 1 | 2.1207 |
| IPI:IPI00625723.2 | TGTGSPFAGNS*PAR\hat{ }EGE | 719 | Zc3h4 | Isoform 2 of Zinc finger CCCH domain- | 2.1078 |
| | QDAGSLK@DVFK@ | | | containing protein 4 | |
| IPI:IPI00221581.1 | T*GSESS*QTGASATSGR\hat{ } | 720 | Eif4b | Eukaryotic translation initiation | 2.103 |
| | | | | factor 4B | |
| IPI:IPI00221581.1 | T*GSESS*QTGASATSGR\hat{ } | 721 | Eif4b | Eukaryotic translation initiation | 2.103 |
| | | | | factor 4B | |
| IPI:IPI00221581.1 | TGS*ESS*QTGASATSGR | 722 | Eif4b | Eukaryotic translation initiation | 2.103 |
| | | | | factor 4B | |
| IPI:IPI00625723.2 | TGTGSPFAGNS*PAR\hat{ }EGE | 723 | Zc3h4 | Isoform 2 of Zinc finger CCCH domain- | 2.0988 |
| | QDAGSLK@DVFK@ | | | containing protein 4 | |
| IPI:IPI00379844.4 | GEQGSLAQSQPQPGDK@N | 724 | Irs2 | Insulin receptor substrate 2 | 2.0959 |
| | S*WSR\hat{ } | | | | |
| IPI:IPI00136107.1 | T*HST*SSS*IGSGESPFSR\hat{ } | 725 | Ndrg3 | Protein NDRG3 | 2.0759 |
| IPI:IPI00467843.2 | GGGAS*SPAPVVFTVGS*PP | 726 | Ulk1 | Putative uncharacterized protein | 2.0752 |
| | S*GATPPQSTR\hat{ } | | | | |
| IPI:IPI00127415.1 | LK@CGSGPVHISGQHLVAV | 727 | Npm1 | Nucleophosmin | 2.0591 |
| | EEDAES*EDEDEEDVK@LL | | | | |
| | GM#SGK@ | | | | |
| IPI:IPI00320905.7 | LGEQGPEPGPT*PPQTPT*P | 728 | Arhgap17 | Isoform 1 of Rho GTPase-activating | 2.0572 |
| | PS*TPPLAK | | | protein 17 | |
| IPI:IPI00622946.2 | QFIAAQNLGPASGLPTPTSS | 729 | Palld | Isoform 4 of Palladin | 2.0517 |
| | *PSSSSLPSPLSPT*PR\hat{ }PFG | | | | |
| | R\hat{ } | | | | |
| IPI:IPI00467843.2 | GGGASS*PAPVVFTVGS*PP | 730 | Ulk1 | Putative uncharacterized protein | 2.0359 |
| | S*GATPPOSTR\hat{ } | | | | |
| IPI:IPI00929786.1 | TASISSSPS*EGTPAVGSYG | 731 | Larp1 | Isoform 1 of La-related protein 1 | 2.0315 |
| | CT*PQSLPK@ | | | | |
| IPI:IPI00309059.7 | ST*S*PIIGS*PPVR\hat{ } | 732 | Patl1 | Protein PAT1 homolog 1 | 2.0311 |
| IPI:IPI00929786.1 | TASIS*SSPS*EGTPAVGSY | 733 | Larp1 | Isoform 1 of La-related protein 1 | 2.0277 |
| | GCT*PQS*LPK@ | | | | |
| IPI:IPI00107958.1 | TSDIFGS*PVTATAPLAHPN | 734 | Hn1l | Hematological and neurological | 2.0059 |
| | KPK | | | expressed 1-like protein | |
| IPI:IPI00336713.1 | CS*PVPGLSSS*PSGSPLHG | 735 | Bcas3 | Isoform 1 of Breast carcinoma- | 1.9848 |
| | K@ | | | amplified sequence 3 homolog | |
| IPI:IPI00136107.1 | THST*SSS*IGSGESPFSR\hat{ } | 736 | Ndrg3 | Protein NDRG3 | 1.9707 |
| IPI:IPI00136107.1 | THSTSS*S*IGSGESPFSR\hat{ } | 737 | Ndrg3 | Protein NDRG3 | 1.9707 |
| IPI:IPI00830210.1 | LSESPAS*LPSCLPVETALIN | 738 | Atg2a | Autophagy-related protein 2 | 1.9651 |
| | QR\hat{ } | | | homolog A | |
| IPI:IPI00225062.2 | GCSPPK@S*PEK@PPQST | 739 | Srrm2 | Isoform 3 of Serine/arginine repetitive | 1.9354 |
| | SS*ESCPPS*PQPTK@ | | | matrix protein 2 | |
| IPI:IPI00122594.4 | ER\hat{ }EVS*VSS*VTEEPK@LD | 740 | Ahctf1 | AT-hook-containing transcription | 1.9159 |
| | SSQLPLQTGLDVPATPR\hat{ } | | | factor 1 | |
| IPI:IPI00336973.2 | GLNLDGTPALSTLGGFS*PA | 741 | Ccnl1 | Isoform 1 of Cyclin-L1 | 1.8986 |
| | SKPSS*PR | | | | |
| IPI:IPI00336973.2 | GLNLDGTPALSTLGGFS*PA | 742 | Ccnl1 | Isoform 1 of Cyclin-L1 | 1.896 |
| | SKPSS*PR | | | | |
| IPI:IPI00336973.2 | GLNLDGTPALSTLGGFS*PA | 743 | Ccnl1 | Isoform 1 of Cyclin-L1 | 1.896 |
| | SK@PS*SPR\hat{ } | | | | |
| IPI:IPI00336973.2 | GLNLDGTPALSTLGGFS*PA | 744 | Ccnl1 | Isoform 1 of Cyclin-L1 | 1.896 |
| | S*KPSSPR | | | | |
| IPI:IPI00336973.2 | GLNLDGTPALSTLGGFSPA | 745 | Ccnl1 | Isoform 1 of Cyclin-L1 | 1.896 |
| | S*K@PS*SPR\hat{ } | | | | |
| IPI:IPI00137166.1 | SR\hat{ }DAT*PPVS*PINMEDQE | 746 | Junb | Transcription factor jun-B | 1.8916 |
| | R\hat{ } | | | | |
| IPI:IPI00336973.2 | GLNLDGTPALSTLGGFS*PA | 747 | Ccnl1 | Isoform 1 of Cyclin-L1 | 1.8893 |
| | S*KPSSPR | | | | |
| IPI:IPI00467930.2 | LVIGS*LPAHLSPHLFGGFK@ | 748 | Znrf2 | E3 ubiquitin-protein ligase ZNRF2 | 1.8798 |
| IPI:IPI00225062.2 | R\hat{ }SSS*ELS*PEVVEK@ | 749 | Srrm2 | Isoform 3 of Serine/arginine repetitive | 1.8718 |
| | | | | matrix protein 2 | |
| IPI:IPI00309059.7 | ST*S*PIIGS*PPVR\hat{ } | 750 | Patl1 | Protein PAT1 homolog 1 | 1.8673 |
| IPI:IPI00751009.1 | TSEFPTPLFSGPLEPVACGS | 751 | Srpk2 | serine/arginine-rich protein specific | 1.859 |
| | VISEGSPLT*EQEESSPSHD | | | kinase 2 | |
| | R\hat{ }SR\hat{ } | | | | |
| IPI:IPI00808277.2 | SAPASPNHAGVLSAHSSGA | 752 | Foxk2 | Isoform 1 of Forkhead box protein K2 | 1.8546 |
| | QT*PES*LSR\hat{ }EGS*PAPLEP | | | | |
| | EPGASQPK@ | | | | |
| IPI:IPI00136107.1 | THS*TSSS*IGSGESPFSR\hat{ } | 753 | Ndrg3 | Protein NDRG3 | 1.8482 |
| IPI:IPI00761759.1 | SSSGSEHST*EGSVSLGDG | 754 | Larp4 | Putative uncharacterized protein | 1.8482 |
| | PLSR\hat{ } | | | | |
| IPI:IPI00122594.4 | EVS*VSS*VTEEPK@LDSSQ | 755 | Ahctf1 | AT-hook-containing transcription | 1.8472 |
| | LPLQTGLDVPATPR\hat{ } | | | factor 1 | |
| IPI:IPI00122594.4 | EVS*VSS*VTEEPK@LDSSQ | 756 | Ahctf1 | AT-hook-containing transcription | 1.8472 |
| | LPLQTGLDVPATPR\hat{ } | | | factor 1 | |
| IPI:IPI00268673.5 | AGTTVPES*IHS*FIGDGLVK | 757 | Mtor | Isoform 1 of FKBP12-rapamycin | 1.8442 |
| | @PEALNK@K@ | | | complex-associated protein | |
| IPI:IPI00314502.5 | VHGLPTTS*PSGVNMAELA | 758 | Tcfeb | Transcription factor EB | 1.8426 |
| | QQVVK@ | | | | |
| IPI:IPI00125319.1 | TTS*FAESCK@PVQQPSAF | 759 | Gsk3b | Glycogen synthase kinase-3 beta | 1.8417 |
| | GSMK@ | | | | |
| IPI:IPI00125319.1 | TTS*FAESCK@PVQQPSAF | 760 | Gsk3b | Glycogen synthase kinase-3 beta | 1.8417 |
| | GSMK@ | | | | |
| IPI:IPI00116285.2 | SQDSYPVS*PR\hat{ }PFSSPSMS | 761 | Ranbp9 | RAN binding protein 9 | 1.8399 |
| | *PSHGMSIHSLAPGK@ | | | | |
| IPI:IPI00323510.5 | TDNSVAS*SPSSAISTATPS* | 762 | Kdm6a | Isoform 1 of Lysine-specific | 1.8307 |
| | PK@ | | | demethylase 6A | |
| IPI:IPI00229859.1 | GHPSAGAEEEGGS*DGS*A | 763 | Eif3b | Eif3b protein | 1.826 |
| | AEAEPR | | | | |
| PI:IPI00136107.1 | THS*TSS*SIGSGESPFSR\hat{ } | 764 | Ndrg3 | Protein NDRG3 | 1.8106 |
| IPI:IPI00136107.1 | T*HSTSSSIGS*GESPFSR\hat{ } | 765 | Ndrg3 | Protein NDRG3 | 1.8106 |
| IPI:IPI00225062.2 | GCS*PPK@S*PEK@PPQST | 766 | Srrm2 | Isoform 3 of Serine/arginine repetitive | 1.8106 |
| | SSESCPPS*PQPTK@ | | | matrix protein 2 | |
| IPI:IPI00405752.3 | VLASS*LS*PYR\hat{ }EGR\hat{ } | 767 | C130092O11Rik | Isoform 1 of Uncharacterized protein | 1.8087 |
| | | | | KIAA1680 | |
| IPI:IPI00136107.1 | THSTSS*S*IGSGESPFSR\hat{ } | 768 | Ndrg3 | Protein NDRG3 | 1.8041 |
| IPI:IPI00130920.1 | RSES*PFEGK | 769 | Mtap1b | Microtubule-associated protein 1B | 1.7981 |
| IPI:IPI00136107.1 | THS*TSS*S*IGSGESPFSR\hat{ } | 770 | Ndrg3 | Protein NDRG3 | 1.7967 |
| IPI:IPI00336713.1 | CS*PVPGLSSS*PSGSPLHG | 771 | Bcas3 | Isoform 1 of Breast carcinoma- | 1.7932 |
| | K@ | | | amplified sequence 3 homolog | |
| IPI:IPI00323349.2 | GYPPPIAAK@PAFGR\hat{ }PILK | 772 | Tjp2 | Tight junction protein ZO-2 | 1.7869 |
| | @PST*PVPMPESEEVGES* | | | | |
| | TEEQEDAPR\hat{ } | | | | |
| IPI:IPI00225062.2 | GCS*PPK@S*PEK@PPQST | 773 | Srrm2 | Isoform 3 of Serine/arginine repetitive | 1.7868 |
| | SSESCPPS*PQPTK@ | | | matrix protein 2 | |
| IPI:IPI00225062.2 | GCS*PPKS*PEKPPQSTSSE | 774 | Srrm2 | Isoform 3 of Serine/arginine repetitive | 1.7868 |
| | SCPPS*PQPTK | | | matrix protein 2 | |
| IPI:IPI00808277.2 | SAPASPNHAGVLSAHSSGA | 775 | Foxk2 | Isoform 1 of Forkhead box protein K2 | 1.7848 |
| | QT*PES*LSR\hat{ }EGS*PAPLEP | | | | |
| | EPGASQPK@ | | | | |
| IPI:IPI00136107.1 | THS*TSS*S*IGSGESPFSR\hat{ } | 776 | Ndrg3 | Protein NDRG3 | 1.7706 |
| IPI:IPI00107958.1 | TSDIFGS*PVTATAPLAHPN | 777 | Hn1l | Hematological and neurological | 1.7561 |
| | K@PK@ | | | expressed 1-like protein | |
| IPI:IPI00136107.1 | THS*TSSS*IGSGESPFSR\hat{ } | 778 | Ndrg3 | Protein NDRG3 | 1.7555 |
| IPI:IPI00136107.1 | THS*TSSS*IGSGESPFSR\hat{ } | 779 | Ndrg3 | Protein NDRG3 | 1.7525 |
| IPI:IPI00130920.1 | RSES*PFEGK | 780 | Mtap1b | Microtubule-associated protein 1B | 1.7508 |
| IPI:IPI00130920.1 | RSES*PFEGK | 781 | Mtap1b | Microtubule-associated protein 1B | 1.7508 |
| IPI:IPI00136107.1 | THS*TSS*SIGSGESPFSR\hat{ } | 782 | Ndrg3 | Protein NDRG3 | 1.7499 |
| IPI:IPI00136107.1 | THS*TSS*SIGSGESPFSR | 783 | Ndrg3 | Protein NDRG3 | 1.7499 |
| IPI:IPI00318938.6 | VALGDGVQLPPGDYSTT*P | 784 | Eif4ebp1 | Eukaryotic translation initiation | 1.7456 |
| | GGTLFS*TTPGGTRIIYDR | | | factor 4E-binding protein 1 | |
| IPI:IPI00468516.3 | R\hat{ }LAAQES*SEAEDVTVDR\hat{ } | 785 | D6Wsu116e | Isoform 1 of Protein FAM21 | 1.7446 |
| | GPVAQLSSS*PVLPNGHQP | | | | |
| | LLQPR\hat{ } | | | | |
| IPI:IPI00137501.1 | TEMDKS*PFNSPS*PQDS*PR | 786 | Nfic | Isoform 1 of Nuclear factor 1 C-type | 1.7419 |
| IPI:IPI00225062.2 | GCS*PPK@S*PEK@PPQS* | 787 | Srrm2 | Isoform 3 of Serine/arginine repetitive | 1.7403 |
| | TSSESCPPSPQPTK@ | | | matrix protein 2 | |
| IPI:IPI00225062.2 | GCS*PPK@S*PEK@PPQST | 788 | Srrm2 | Isoform 3 of Serine/arginine repetitive | 1.7403 |
| | SSESCPPS*PQPTK@ | | | matrix protein 2 | |
| IPI:IPI00225062.2 | GCS*PPKS*PEKPPQSTSS* | 789 | Srrm2 | Isoform 3 of Serine/arginine repetitive | 1.7403 |
| | ESCPPSPQPTK | | | matrix protein 2 | |
| IPI:IPI00336973.2 | GLNLDGTPALSTLGGFS*PA | 790 | Ccnl1 | Isoform 1 of Cyclin-L1 | 1.7368 |
| | SK@PS*SPR\hat{ } | | | | |
| IPI:IPI00107958.1 | TSDIFGS*PVTATAPLAHPN | 791 | Hn1l | Hematological and neurological | 1.7353 |
| | K@PK@ | | | expressed 1-like protein | |
| IPI:IPI00227209.3 | R\hat{ }LSS*T*SLASGHSVR\hat{ } | 792 | Prkd2 | Serine/threonine-protein kinase D2 | 1.7328 |
| IPI:IPI00225062.2 | RSS*SELS*PEVVEK | 793 | Srrm2 | Isoform 3 of Serine/arginine repetitive | 1.7324 |
| | | | | matrix protein 2 | |
| IPI:IPI00225062.2 | R\hat{ }SS*SELS*PEVVEK@ | 794 | Srrm2 | Isoform 3 of Serine/arginine repetitive | 1.7324 |
| | | | | matrix protein 2 | |
| IPI:IPI00225062.2 | RSS*SELS*PEVVEK | 795 | Srrm2 | Isoform 3 of Serine/arginine repetitive | 1.7324 |
| | | | | matrix protein 2 | |
| IPI:IPI00225062.2 | R\hat{ }SSS*ELS*PEVVEK@ | 796 | Srrm2 | Isoform 3 of Serine/arginine repetitive | 1.7324 |
| | | | | matrix protein 2 | |
| IPI:IPI00929779.1 | S*EGLSQEATPSQDLIQHSC | 797 | Usp36 | Ubiquitin specific peptidase 36 | 1.7192 |
| | SPVDHSEPEAR\hat{ } | | | | |
| IPI:IPI00467930.2 | LVIGS*LPAHLS*PHLFGGFK | 798 | Znrf2 | E3 ubiquitin-protein ligase ZNRF2 | 1.7137 |
| IPI:IPI00467930.2 | LVIGS*LPAHLS*PHLFG | 799 | Znrf2 | E3 ubiquitin-protein ligase ZNRF2 | 1.7137 |
| | GFK@ | | | | |
| IPI:IPI00459443.5 | DLQSEFGVATDSHHSSFGS | 800 | Tnks1bp1 | 182 kDa tankyrase-1-binding protein | 1.7011 |
| | SSWSQDTSQNYSLGGR\hat{ }S* | | | | |
| | PVGDTGLGK@ | | | | |
| IPI:IPI00785400.1 | LTSHTPGLDDEKEAS*ENET | 801 | Syne2 | Syne2 protein | 1.7003 |
| | *DIEDPREIQADSWR | | | | |
| IPI:IPI00136107.1 | THST*SSSIGSGESPFSR\hat{ } | 802 | Ndrg3 | Protein NDRG3 | 1.6838 |
| IPI:IPI00136107.1 | THST*SSSIGSGESPFSR\hat{ } | 803 | Ndrg3 | Protein NDRG3 | 1.6838 |
| IPI:IPI00336713.1 | QGGRCS*PVPGLSSS*PSG | 804 | Bcas3 | Isoform 1 of Breast carcinoma- | 1.6818 |
| | SPLHGK | | | amplified sequence 3 homolog | |
| IPI:IPI00336713.1 | QGGR\hat{ }CS*PVPGLSS*SPSG | 805 | Bcas3 | Isoform 1 of Breast carcinoma- | 1.6818 |
| | SPLHGK@ | | | amplified sequence 3 homolog | |
| IPI:IPI00380354.1 | LQES*PKLSQANGTR | 806 | Llgl1 | lethal giant larvae homolog 1 isoform 1 | 1.6806 |
| IPI:IPI00128904.1 | VMTIPYQPMPASS*PVICAG | 807 | Pcbp1 | Poly(rC)-binding protein 1 | 1.6782 |
| | GQDR | | | | |
| IPI:IPI00380107.4 | LVIPS*ATTKSPPEITVT* | 808 | Cabin1 | calcineurin binding protein 1 | 1.6782 |
| | PPT*PTLLSPK | | | | |
| IPI:IPI00153375.1 | SACFS*PVSLS*PR\hat{ }PCS*PF | 809 | Pdlim2 | PDZ and LIM domain protein 2 | 1.6659 |
| | STPPPTSPVALSK@ | | | | |
| IPI:IPI00467930.2 | LVIGS*LPAHLSPHLFGGFK@ | 810 | Znrf2 | E3 ubiquitin-protein ligase ZNRF2 | 1.6655 |
| IPI:IPI00467930.2 | LVIGS*LPAHLSPHLFGGFK@ | 811 | Znrf2 | E3 ubiquitin-protein ligase ZNRF2 | 1.6655 |
| IPI:IPI00221581.1 | S*R\hat{ }TGS*ESS*QTGASATS | 812 | Eif4b | Eukaryotic translation initiation | 1.6642 |
| | GR\hat{ } | | | factor 4B | |
| IPI:IPI00318938.6 | NS*PVAK@T*PPK@DLPAIP | 813 | Eif4ebp1 | Eukaryotic translation initiation | 1.6633 |
| | GVTSPTSDEPPMQASQSQL | | | factor 4E-binding protein 1 | |
| | PSSPEDK@ | | | | |
| IPI:IPI00120529.2 | NK@PLS*PIK@LTPTSVLDY | 814 | Rfc1 | Rfc1 protein | 1.6568 |
| | FGTESVQR\hat{ } | | | | |
| IPI:IPI00225062.2 | RSS*SELS*PEVVEK | 815 | Srrm2 | Isoform 3 of Serine/arginine repetitive | 1.6324 |
| | | | | matrix protein 2 | |
| IPI:IPI00225062.2 | R\hat{ }SS*SELS*PEVVEK@ | 816 | Srrm2 | Isoform 3 of Serine/arginine repetitive | 1.6324 |
| | | | | matrix protein 2 | |
| IPI:IPI00225062.2 | R\hat{ }SS*SELS*PEVVEK@ | 817 | Srrm2 | Isoform 3 of Serine/arginine repetitive | 1.6324 |
| | | | | matrix protein 2 | |
| IPI:IPI00225062.2 | RSS*SELS*PEVVEK | 818 | Srrm2 | Isoform 3 of Serine/arginine repetitive | 1.6324 |
| | | | | matrix protein 2 | |
| IPI:IPI00225062.2 | R\hat{ }SS*SELS*PEVVEK@ | 819 | Srrm2 | Isoform 3 of Serine/arginine repetitive | 1.6324 |
| | | | | matrix protein 2 | |
| IPI:IPI00225062.2 | R\hat{ }SS*SELS*PEVVEK@ | 820 | Srrm2 | Isoform 3 of Serine/arginine repetitive | 1.6324 |
| | | | | matrix protein 2 | |
| IPI:IPI00761759.1 | SSSGSEHSTEGS*VSLGDG | 821 | Larp4 | Putative uncharacterized protein | 1.6294 |
| | PLSR\hat{ } | | | | |
| IPI:IPI00309059.7 | R\hat{ }S*TS*PIIGS*PPVR\hat{ } | 822 | Patl1 | Protein PAT1 homolog 1 | 1.6275 |
| IPI:IPI00309059.7 | R\hat{ }S*TS*PIIGS*PPVR\hat{ } | 823 | Patl1 | Protein PAT1 homolog 1 | 1.6245 |
| IPI:IPI00317401.6 | AES*PETSAVESTQS*TPQK | 824 | Pds5b | Isoform 1 of Sister chromatid cohesion | 1.623 |
| | @GR\hat{ } | | | protein PDS5 homolog B | |
| IPI:IPI00317401.6 | AES*PETSAVESTQST*PQK | 825 | Pds5b | Isoform 1 of Sister chromatid cohesion | 1.623 |
| | @GR\hat{ } | | | protein PDS5 homolog B | |
| IPI:IPI00115620.1 | AS*LYNAVTTEDVEK | 826 | Psat1 | Phosphoserine aminotransferase | 1.6216 |
| IPI:IPI00126124.2 | T*FSECS*YPETEEEAEALP | 827 | St5 | Isoform 1 of Suppression of | 1.6159 |
| | GR\hat{ } | | | tumorigenicity 5 | |
| IPI:IPI00421179.1 | SFS*K@EVEER\hat{ } | 828 | Eif4g1 | Isoform 1 of Eukaryotic translation | 1.6081 |
| | | | | initiation factor 4 gamma 1 | |
| IPI:IPI00225062.2 | GCSPPK@S*PEK@PPQST* | 829 | Srrm2 | Isoform 3 of Serine/arginine repetitive | 1.608 |
| | SSESCPPS*PQPTK@ | | | matrix protein 2 | |
| IPI:IPI00227934.3 | AAPSS*EGDS*CDGVEATDA | 830 | Cux1 | cut-like homeobox 1 isoform a | 1.6068 |
| | EEPGGNIVATK@ | | | | |
| IPI:IPI00314240.5 | K@LEK@EEEEGIS*QES*S* | 831 | Hmga1 | Isoform HMG-I of High mobility group | 1.6058 |
| | EEEQ | | | protein HMG-I/HMG-Y | |
| IPI:IPI00111754.6 | LDT*FCGSPPYAAPELFQGK | 832 | Mark2 | Isoform 2 of Serine/threonine-protein | 1.5994 |
| | | | | kinase MARK2 | |
| IPI:IPI00125319.1 | TTS*FAESCK@PVQQPSAF | 833 | Gsk3b | Glycogen synthase kinase-3 beta | 1.5966 |
| | GSMK@ | | | | |
| IPI:IPI00320905.7 | LGEQGPEPGPT*PPQT*PTP | 834 | Arhgap17 | Isoform 1 of Rho GTPase-activating | 1.5946 |
| | PS*TPPLAK | | | protein 17 | |
| IPI:IPI00380737.1 | TSSVS*S*LASACTGGIPSSS | 835 | Pom121 | Nuclear envelope pore membrane | 1.5883 |
| | R\hat{ } | | | protein POM 121 | |
| IPI:IPI00122594.4 | TTPLAS*PSLS*PGR\hat{ } | 836 | Ahctf1 | AT-hook-containing transcription | 1.5845 |
| | | | | factor 1 | |
| IPI:IPI00125319.1 | TTS*FAESCK@PVQQPSAF | 837 | Gsk3b | Glycogen synthase kinase-3 beta | 1.5821 |
| | GSMK@ | | | | |
| IPI:IPI00381019.1 | KRS*PS*PSPTPEAK | 838 | Smarcc2 | Isoform 2 of SWI/SNF complex subunit | 1.5795 |
| | | | | SMARCC2 | |
| IPI:IPI00111754.6 | LDT*FCGSPPYAAPELFQGK@ | 839 | Mark2 | Isoform 2 of Serine/threonine-protein | 1.578 |
| | | | | kinase MARK2 | |
| IPI:IPI00111754.6 | LDT*FCGSPPYAAPELFQGK@ | 840 | Mark2 | Isoform 2 of Serine/threonine-protein | 1.578 |
| | | | | kinase MARK2 | |
| IPI:IPI00136107.1 | THS*TSSSIGSGESPFSR\hat{ } | 841 | Ndrg3 | Protein NDRG3 | 1.576 |
| IPI:IPI00136107.1 | THS*TSSSIGSGESPFSR\hat{ } | 842 | Ndrg3 | Protein NDRG3 | 1.576 |
| IPI:IPI00128904.1 | VMTIPYQPMPASS*PVICAG | 843 | Pcbp1 | Poly(rC)-binding protein 1 | 1.5752 |
| | GQDR | | | | |
| IPI:IPI00225062.2 | S*SS*PVTELTAR\hat{ } | 844 | Srrm2 | Isoform 3 of Serine/arginine repetitive | 1.5701 |
| | | | | matrix protein 2 | |
| IPI:IPI00421179.1 | SFS*KEVEER | 845 | Eif4g1 | Isoform 1 of Eukaryotic translation | 1.5642 |
| | | | | initiation factor 4 gamma 1 | |
| IPI:IPI00421179.1 | SFS*K@EVEER\hat{ } | 846 | Eif4g1 | Isoform 1 of Eukaryotic translation | 1.5642 |
| | | | | initiation factor 4 gamma 1 | |
| IPI:IPI00421179.1 | SFS*KEVEER | 847 | Eif4g1 | Isoform 1 of Eukaryotic translation | 1.5642 |
| | | | | initiation factor 4 gamma 1 | |
| IPI:IPI00421179.1 | SFS*K@EVEER\hat{ } | 848 | Eif4g1 | Isoform 1 of Eukaryotic translation | 1.5642 |
| | | | | initiation factor 4 gamma 1 | |
| IPI:IPI00115492.1 | HSLSSESQAPEDIAPPGS*S | 849 | Eps8l2 | Isoform 1 of Epidermal growth factor | 1.564 |
| | PHANR\hat{ } | | | receptor kinase substrate 8-like | |
| | | | | protein 2 | |
| IPI:IPI00761759.1 | S*SS*GS*EHSTEGSVSLGD | 850 | Larp4 | Putative uncharacterized protein | 1.5621 |
| | GPLSR\hat{ } | | | | |
| IPI:IPI00136107.1 | THSTS*SSIGSGESPFSR\hat{ } | 851 | Ndrg3 | Protein NDRG3 | 1.5584 |
| IPI:IPI00111754.6 | LDT*FCGSPPYAAPELFQGK | 852 | Mark2 | Isoform 2 of Serine/threonine-protein | 1.5403 |
| | | | | kinase MARK2 | |
| IPI:IPI00336973.2 | GLNLDGT*PALSTLGGFS*P | 853 | Ccnl1 | Isoform 1 of Cyclin-L1 | 1.5363 |
| | ASK@PS*SPR\hat{ } | | | | |
| IPI:IPI00229739.4 | LVVSS*PTS*PK@GK@ | 854 | Plekhm1 | Pleckstrin homology domain-containing | 1.5286 |
| | | | | family M member 1 | |
| IPI:IPI00126124.2 | TFSECS*Y*PETEEEAEALP | 855 | St5 | Isoform 1 of Suppression of | 1.526 |
| | GR\hat{ } | | | tumorigenicity 5 | |
| IPI:IPI00122594.4 | TTPLAS*PSLS*PGR\hat{ } | 856 | Ahctf1 | AT-hook-containing transcription | 1.5177 |
| | | | | factor 1 | |
| IPI:IPI00229739.4 | LWSS*PTS*PKGK | 857 | Plekhm1 | Pleckstrin homology domain-containing | 1.515 |
| | | | | family M member 1 | |
| IPI:IPI00421179.1 | SFS*K@EVEER\hat{ } | 858 | Eif4g1 | Isoform 1 of Eukaryotic translation | 1.5113 |
| | | | | initiation factor 4 gamma 1 | |
| IPI:IPI00421179.1 | SFS*KEVEER | 859 | Eif4g1 | Isoform 1 of Eukaryotic translation | 1.5113 |
| | | | | initiation factor 4 gamma 1 | |
| IPI:IPI00349069.4 | LFGT*SPAAEVTPSPPEPAP | 860 | B230208H17Rik | Putative GTP-binding protein Parf | 1.5073 |
| | ALEAPAR\hat{ } | | | | |
| IPI:IPI00605037.1 | KET*ES*EAEDDNLDDLER | 861 | Srrm1 | Isoform 1 of Serine/arginine repetitive | 1.5038 |
| | | | | matrix protein 1 | |
| IPI:IPI00381244.8 | KEELGASS*PGYGPPNLGC | 862 | Mll2 | similar to myeloid/lymphoid or mixed- | 1.4993 |
| | VDS*PSAGPHLGGLELK | | | lineage leukemia 2 | |
| IPI:IPI00421179.1 | SFS*K@EVEER\hat{ } | 863 | Eif4g1 | Isoform 1 of Eukaryotic translation | 1.4913 |
| | | | | initiation factor 4 gamma 1 | |
| IPI:IPI00421179.1 | SFS*KEVEER | 864 | Eif4g1 | Isoform 1 of Eukaryotic translation | 1.4913 |
| | | | | initiation factor 4 gamma 1 | |
| IPI:IPI00421179.1 | SFS*KEVEER | 865 | Eif4g1 | Isoform 1 of Eukaryotic translation | 1.4913 |
| | | | | initiation factor 4 gamma 1 | |
| IPI:IPI00421179.1 | SFS*K@EVEER\hat{ } | 866 | Eif4g1 | Isoform 1 of Eukaryotic translation | 1.4913 |
| | | | | initiation factor 4 gamma 1 | |
| IPI:IPI00136572.4 | YEENPAWPGTSTHNGPNG | 867 | Zc3hav1 | Isoform 1 of Zinc finger CCCH-type | 1.4864 |
| | FSQIMDET*PNVSK@SSPT | | | antiviral protein 1 | |
| | GFGIK@ | | | | |
| IPI:IPI00318938.6 | NS*PVAK@T*PPK@DLPAIP | 868 | Eif4ebp1 | Eukaryotic translation initiation | 1.4819 |
| | GVTSPTSDEPPMQASQSQL | | | factor 4E-binding protein 1 | |
| | PSSPEDK@ | | | | |
| IPI:IPI00318938.6 | NS*PVAK@T*PPK@DLPAIP | 869 | Eif4ebp1 | Eukaryotic translation initiation | 1.4819 |
| | GVTSPTSDEPPMQASQSQL | | | factor 4E-binding protein 1 | |
| | PSSPEDK@ | | | | |
| IPI:IPI00318938.6 | NSPVAKT*PPKDLPAIPGVT* | 870 | Eif4ebp1 | Eukaryotic translation initiation | 1.4819 |
| | SPTSDEPPMQASQSQLPSS | | | factor 4E-binding protein 1 | |
| | PEDK | | | | |
| IPI:IPI00318938.6 | NS*PVAK@T*PPK@DLPAIP | 871 | Eif4ebp1 | Eukaryotic translation initiation | 1.4819 |
| | GVTSPTSDEPPMQASQSQL | | | factor 4E-binding protein 1 | |
| | PSSPEDK@ | | | | |
| IPI:IPI00318938.6 | NS*PVAKT*PPKDLPAIPGVT | 872 | Eif4ebp1 | Eukaryotic translation initiation | 1.4819 |
| | SPTSDEPPMQASQSQLPSS | | | factor 4E-binding protein 1 | |
| | PEDK | | | | |
| IPI:IPI00228948.3 | S*FGDK@DLILPNGGTPAG | 873 | Snx30 | Sorting nexin-30 | 1.4774 |
| | TASPASSSSLLNR\hat{ } | | | | |
| IPI:IPI00330246.2 | WAAHGTS*PEDFSLTLGAR\hat{ } | 874 | Phldb1 | Isoform 2 of Pleckstrin homology-like | 1.474 |
| | | | | domain family B member 1 | |
| IPI:IPI00229739.4 | LVVSS*PTS*PK@GK@ | 875 | Plekhm1 | Pleckstrin homology domain-containing | 1.4728 |
| | | | | family M member 1 | |
| IPI:IPI00229739.4 | LVVSS*PT*SPKGK | 876 | Plekhm1 | Pleckstrin homology domain-containing | 1.4728 |
| | | | | family M member 1 | |
| IPI:IPI00453603.1 | FIGS*PR\hat{ }T*PVS*PVK@FSP | 877 | Rps6kb1 | Isoform Alpha I of Ribosomal protein | 1.4727 |
| | GDFWGR\hat{ } | | | S6 kinase beta-1 | |
| IPI:IPI00136107.1 | THS*TSSSIGSGESPFSR\hat{ } | 878 | Ndrg3 | Protein NDRG3 | 1.4724 |
| IPI:IPI00136107.1 | THS*TSSSIGSGESPFSR\hat{ } | 879 | Ndrg3 | Protein NDRG3 | 1.4724 |
| IPI:IPI00317401.6 | AES*PETSAVESTQST*PQK | 880 | Pds5b | Isoform 1 of Sister chromatid cohesion | 1.4711 |
| | @GR\hat{ } | | | protein PDS5 homolog B | |
| IPI:IPI00317401.6 | AES*PETSAVESTQST*PQK | 881 | Pds5b | Isoform 1 of Sister chromatid cohesion | 1.4711 |
| | @GR\hat{ } | | | protein PDS5 homolog B | |
| IPI:IPI00453603.1 | FIGS*PRT*PVS*PVKFSPGD | 882 | Rps6kb1 | Isoform Alpha I of Ribosomal protein | 1.4689 |
| | FWGR | | | S6 kinase beta-1 | |
| IPI:IPI00453603.1 | FIGS*PR\hat{ }T*PVS*PVK@FSP | 883 | Rps6kb1 | Isoform Alpha I of Ribosomal protein | 1.4689 |
| | GDFWGR\hat{ } | | | S6 kinase beta-1 | |
| IPI:IPI00453603.1 | FIGS*PR\hat{ }T*PVS*PVK@FSP | 884 | Rps6kb1 | Isoform Alpha I of Ribosomal protein | 1.4689 |
| | GDFWGR\hat{ } | | | S6 kinase beta-1 | |
| IPI:IPI00380737.1 | TS*SVSS*LASACTGGIPSSS | 885 | Pom121 | Nuclear envelope pore membrane | 1.4684 |
| | R\hat{ } | | | protein POM 121 | |
| IPI:IPI00380737.1 | TS*SVSS*LASACTGGIPSSS | 886 | Pom121 | Nuclear envelope pore membrane | 1.4684 |
| | R\hat{ } | | | protein POM 121 | |
| IPI:IPI00318938.6 | NS*PVAKT*PPKDLPAIPGVT | 887 | Eif4ebp1 | Eukaryotic translation initiation | 1.4676 |
| | SPTSDEPPMQASQSQLPSS | | | factor 4E-binding protein 1 | |
| | PEDK | | | | |
| IPI:IPI00317401.6 | AES*PETSAVESTQST*PQK | 888 | Pds5b | Isoform 1 of Sister chromatid cohesion | 1.4613 |
| | @GR\hat{ } | | | protein PDS5 homolog B | |
| IPI:IPI00317401.6 | AES*PETSAVESTQST*PQK | 889 | Pds5b | Isoform 1 of Sister chromatid cohesion | 1.4526 |
| | @GR\hat{ } | | | protein PDS5 homolog B | |
| IPI:IPI00317401.6 | AES*PETSAVESTQST*PQK | 890 | Pds5b | Isoform 1 of Sister chromatid cohesion | 1.4526 |
| | @GR\hat{ } | | | protein PDS5 homolog B | |
| IPI:IPI00136107.1 | S*RT*HSTSSSIGSGESPFSR | 891 | Ndrg3 | Protein NDRG3 | 1.451 |
| IPI:IPI00118438.4 | KPPAPPSPVQS*QSPS*T*N | 892 | Srrm1 | Isoform 2 of Serine/arginine repetitive | 1.45 |
| | WS*PAVPAKK | | | matrix protein 1 | |
| IPI:IPI00123410.5 | TIS*AQDTLAYATALLNEK@ | 893 | Usp24 | Isoform 1 of Ubiquitin carboxyl- | 1.4486 |
| | | | | terminal hydrolase 24 | |
| IPI:IPI00411026.1 | SLHPWYGITPTSS*PK@ | 894 | Micall1 | Isoform 1 of MICAL-like protein 1 | 1.4479 |
| IPI:IPI00761759.1 | SSS*GSEHS*T*EGSVSLGD | 895 | Larp4 | Putative uncharacterized protein | 1.4347 |
| | GPLSR\hat{ } | | | | |
| IPI:IPI00313307.3 | SYQNSPS*S*EDGIR\hat{ }PLPEY | 896 | Med1 | Isoform 4 of Mediator of RNA | 1.4214 |
| | STEK@ | | | polymerase II transcription subunit 1 | |
| IPI:IPI00313307.3 | SYQNS*PSS*EDGIR\hat{ }PLPEY | 897 | Med1 | Isoform 4 of Mediator of RNA | 1.4158 |
| | STEK@ | | | polymerase II transcription subunit 1 | |
| IPI:IPI00129264.1 | ATSR\hat{ }PINLGPSS*PNTEIHW | 898 | Sorbs3 | Vinexin | 1.4122 |
| | TPYR\hat{ } | | | | |
| IPI:IPI00330773.3 | ASYSGTS*PSHS*FISGEPD | 899 | Phldb2 | Isoform 1 of Pleckstrin homology-like | 1.403 |
| | R\hat{ } | | | domain family B member 2 | |
| IPI:IPI00116442.1 | TR\hat{ }LAS*ES*ANDDNEDS | 900 | Hdgfrp2 | Isoform 3 of Hepatoma-derived growth | 1.3985 |
| | | | | factor-related protein 2 | |
| IPI:IPI00309059.7 | STS*PIIGS*PPVR\hat{ } | 901 | Patl1 | Protein PAT1 homolog 1 | 1.3955 |
| IPI:IPI00309059.7 | STS*PIIGS*PPVR\hat{ } | 902 | Patl1 | Protein PAT1 homolog 1 | 1.3937 |
| IPI:IPI00309059.7 | STS*PIIGS*PPVR\hat{ } | 903 | Patl1 | Protein PAT1 homolog 1 | 1.3937 |
| IPI:IPI00309059.7 | STS*PIIGS*PPVR | 904 | Patl1 | Protein PAT1 homolog 1 | 1.3937 |
| IPI:IPI00318938.6 | NS*PVAK@TPPK@DLPAIP | 905 | Eif4ebp1 | Eukaryotic translation initiation | 1.3906 |
| | GVTSPTS*DEPPMQASQSQ | | | factor 4E-binding protein 1 | |
| | LPSSPEDK@ | | | | |
| IPI:IPI00318938.6 | NS*PVAKT*PPKDLPAIPGVT | 906 | Eif4ebp1 | Eukaryotic translation initiation | 1.3906 |
| | SPTSDEPPMQASQSQLPSS | | | factor 4E-binding protein 1 | |
| | PEDK | | | | |
| IPI:IPI00108388.1 | R\hat{ }PYTGNPQYTYNNWS*PP | 907 | Usp9x | Probable ubiquitin carboxyl-terminal | 1.3905 |
| | VQSNETSNGYFLER\hat{ } | | | hydrolase FAF-X | |
| IPI:IPI00108388.1 | RPYTGNPQYTYNNWS*PPV | 908 | Usp9x | Probable ubiquitin carboxyl-terminal | 1.3905 |
| | QSNETSNGYFLER | | | hydrolase FAF-X | |
| IPI:IPI00309059.7 | STS*PIIGS*PPVR\hat{ } | 909 | Patl1 | Protein PAT1 homolog 1 | 1.3897 |
| IPI:IPI00309059.7 | STS*PIIGS*PPVR\hat{ } | 910 | Patl1 | Protein PAT1 homolog 1 | 1.3897 |
| IPI:IPI00556837.1 | DTVIIVS*EPS*EDEESHDLP | 911 | Smarcad1 | Isoform 1 of SWI/SNF-related matrix- | 1.3868 |
| | SVTR | | | associated actin-dependent regulator of | |
| | | | | chromatin subfamily A containing | |
| | | | | DEAD/H box 1 | |
| IPI:IPI00318938.6 | NS*PVAKT*PPKDLPAIPGVT | 912 | Eif4ebp1 | Eukaryotic translation initiation | 1.3764 |
| | SPTSDEPPMQASQSQLPSS | | | factor 4E-binding protein 1 | |
| | PEDK | | | | |
| IPI:IPI00467843.2 | GGGASSPAPVVFTVGS*PP | 913 | Ulk1 | Putative uncharacterized protein | 1.3745 |
| | SGAT*PPQSTR\hat{ } | | | | |
| IPI:IPI00467843.2 | GGGASSPAPVVFTVGS*PP | 914 | Ulk1 | Putative uncharacterized protein | 1.3745 |
| | SGATPPQST*R\hat{ } | | | | |
| IPI:IPI00467843.2 | GGGASSPAPVVFTVGS*PP | 915 | Ulk1 | Putative uncharacterized protein | 1.3702 |
| | SGAT*PPQSTR\hat{ } | | | | |
| IPI:IPI00330773.3 | ASYSGTS*PSHSFISGEPDR\hat{ } | 916 | Phldb2 | Isoform 1 of Pleckstrin homology-like | 1.3697 |
| | | | | domain family B member 2 | |
| IPI:IPI00330773.3 | AS*YSGTSPSHSFISGEPDR | 917 | Phldb2 | Isoform 1 of Pleckstrin homology-like | 1.3697 |
| | | | | domain family B member 2 | |
| IPI:IPI00330773.3 | ASYSGTS*PSHSFISGEPDR\hat{ } | 918 | Phldb2 | Isoform 1 of Pleckstrin homology-like | 1.3697 |
| | | | | domain family B member 2 | |
| IPI:IPI00117932.2 | SPPVQPHTPVTIS*LGTAPS | 919 | Sin3a | Isoform 1 of Paired amphipathic helix | 1.3566 |
| | LQNNQPVEFNHAINYVNK@ | | | protein Sin3a | |
| IPI:IPI00309059.7 | STS*PIIGS*PPVR\hat{ } | 920 | Patl1 | Protein PAT1 homolog 1 | 1.3334 |
| IPI:IPI00309059.7 | STS*PIIGS*PPVR\hat{ } | 921 | Patl1 | Protein PAT1 homolog 1 | 1.3334 |
| IPI:IPI00224153.6 | VHHS*VQTFQEDSLPVAHS* | 922 | Ptpn21 | Tyrosine-protein phosphatase non- | 1.3332 |
| | LQEVSEPLTAAR\hat{ } | | | receptor type 21 | |
| IPI:IPI00224153.6 | VHHSVQT*FQEDSLPVAHS* | 923 | Ptpn21 | Tyrosine-protein phosphatase non- | 1.3332 |
| | LQEVSEPLTAAR | | | receptor type 21 | |
| IPI:IPI00136572.4 | FHHNS*LEVLSTVS*PLGSG | 924 | Zc3hav1 | Isoform 1 of Zinc finger CCCH-type | 1.3312 |
| | PPS*PDVTGCK@DPLEDVS | | | antiviral protein 1 | |
| | ADVTQK@ | | | | |
| IPI:IPI00309059.7 | STS*PIIGS*PPVR | 925 | Patl1 | Protein PAT1 homolog 1 | 1.3311 |
| IPI:IPI00309059.7 | STS*PIIGS*PPVR\hat{ } | 926 | Patl1 | Protein PAT1 homolog 1 | 1.3311 |
| IPI:IPI00309059.7 | STS*PIIGS*PPVR\hat{ } | 927 | Patl1 | Protein PAT1 homolog 1 | 1.3311 |
| IPI:IPI00309059.7 | STS*PIIGS*PPVR | 928 | Patl1 | Protein PAT1 homolog 1 | 1.3311 |
| IPI:IPI00309059.7 | R\hat{ }STS*PIIGS*PPVR\hat{ } | 929 | Patl1 | Protein PAT1 homolog 1 | 1.3267 |
| IPI:IPI00229739.4 | LVVSSPT*S*PK@ | 930 | Plekhm1 | Pleckstrin homology domain-containing | 1.3252 |
| | | | | family M member 1 | |
| IPI:IPI00321774.2 | HSSIS*PVR\hat{ }LPLNSSLGAEL | 931 | Crkrs | Isoform 2 of Cell division cycle 2- | 1.3231 |
| | SR\hat{ } | | | related protein kinase 7 | |
| IPI:IPI00129264.1 | ATSR\hat{ }PINLGPS*SPNTEIHW | 932 | Sorbs3 | Vinexin | 1.3226 |
| | TPYR\hat{ } | | | | |
| IPI:IPI00380354.1 | LQES*PKLSQANGTR | 933 | Llgl1 | lethal giant larvae homolog 1 isoform 1 | 1.3225 |
| IPI:IPI00320905.7 | LGEQGPEPGPT*PPQT*PT* | 934 | Arhgap17 | Isoform 1 of Rho GTPase-activating | 1.3166 |
| | PPST*PPLAK | | | protein 17 | |
| IPI:IPI00381495.5 | TVSS*PIPYTPSPS*SSR\hat{ }PIS | 935 | Ccdc6 | coiled-coil domain containing 6 | 1.3165 |
| | *PGLSYASHTVGFT*PPTSL | | | | |
| | TR\hat{ } | | | | |
| IPI:IPI00330773.3 | ASYSGTS*PSHS*FISGEPD | 936 | Phldb2 | Isoform 1 of Pleckstrin homology-like | 1.3149 |
| | R\hat{ } | | | domain family B member 2 | |
| IPI:IPI00660767.2 | VDTAASSSWLAGS*CS*PVS | 937 | Ibtk | Isoform 2 of Inhibitor of Bruton | 1.3143 |
| | PPVVDLR\hat{ } | | | tyrosine kinase | |
| IPI:IPI00309059.7 | RSTS*PIIGS*PPVR | 938 | Patl1 | Protein PAT1 homolog 1 | 1.3126 |
| IPI:IPI00309059.7 | R\hat{ }STS*PIIGS*PPVR\hat{ } | 939 | Patl1 | Protein PAT1 homolog 1 | 1.3126 |
| IPI:IPI00309059.7 | R\hat{ }STS*PIIGS*PPVR\hat{ } | 940 | Patl1 | Protein PAT1 homolog 1 | 1.3126 |
| IPI:IPI00309059.7 | RSTS*PIIGS*PPVR | 941 | Patl1 | Protein PAT1 homolog 1 | 1.3123 |
| IPI:IPI00309059.7 | RSTS*PIIGS*PPVR | 942 | Patl1 | Protein PAT1 homolog 1 | 1.3122 |
| IPI:IPI00309059.7 | R\hat{ }STS*PIIGS*PPVR\hat{ } | 943 | Patl1 | Protein PAT1 homolog 1 | 1.3122 |
| IPI:IPI00309059.7 | R\hat{ }STS*PIIGS*PPVR\hat{ } | 944 | Patl1 | Protein PAT1 homolog 1 | 1.3122 |
| IPI:IPI00112593.2 | S*T*S*S*PK@ | 945 | Spert | Isoform 2 of Spermatid-associated | 1.3085 |
| | | | | protein | |
| IPI:IPI00129264.1 | ATSR\hat{ }PINLGPSS*PNTEIHW | 946 | Sorbs3 | Vinexin | 1.3056 |
| | TPYR\hat{ } | | | | |
| IPI:IPI00129264.1 | ATSRPINLGPSS*PNTEIHW | 947 | Sorbs3 | Vinexin | 1.3056 |
| | TPYR | | | | |
| IPI:IPI00116442.1 | TR\hat{ }LAS*ES*ANDDNEDS | 948 | Hdgfrp2 | Isoform 3 of Hepatoma-derived growth | 1.3036 |
| | | | | factor-related protein 2 | |
| IPI:IPI00313307.3 | SYQNS*PSS*EDGIRPLPEY | 949 | Med1 | Isoform 4 of Mediator of RNA | 1.298 |
| | STEK | | | polymerase II transcription subunit 1 | |
| IPI:IPI00313307.3 | SYQNS*PSS*EDGIR\hat{ }PLPEY | 950 | Med1 | Isoform 4 of Mediator of RNA | 1.298 |
| | STEK@ | | | polymerase II transcription subunit 1 | |
| IPI:IPI00313307.3 | SYQNS*PSS*EDGIR\hat{ }PLPEY | 951 | Med1 | Isoform 4 of Mediator of RNA | 1.298 |
| | STEK@ | | | polymerase II transcription subunit 1 | |
| IPI:IPI00330773.3 | ASYSGTS*PSHSFISGEPDR\hat{ } | 952 | Phldb2 | Isoform 1 of Pleckstrin homology-like | 1.2944 |
| | | | | domain family B member 2 | |
| IPI:IPI00330773.3 | ASYSGTS*PSHSFISGEPDR | 953 | Phldb2 | Isoform 1 of Pleckstrin homology-like | 1.2944 |
| | | | | domain family B member 2 | |
| IPI:IPI00330773.3 | ASYSGTS*PSHSFISGEPDR\hat{ } | 954 | Phldb2 | Isoform 1 of Pleckstrin homology-like | 1.2944 |
| | | | | domain family B member 2 | |
| IPI:IPI00153986.2 | GTS*R\hat{ }PGTPS*AEAASTSS | 955 | Gtf2f1 | General transcription factor IIF | 1.2876 |
| | TLR\hat{ } | | | subunit 1 | |
| IPI:IPI00153986.2 | GTSRPGT*PS*AEAASTSST | 956 | Gtf2f1 | General transcription factor IIF | 1.2876 |
| | LR | | | subunit 1 | |
| IPI:IPI00318938.6 | VALGDGVQLPPGDYSTT*P | 957 | Eif4ebp1 | Eukaryotic translation initiation | 1.2862 |
| | GGTLFS*TTPGGTR\hat{ }IIYDR\hat{ } | | | factor 4E-binding protein 1 | |
| | K@ | | | | |
| IPI:IPI00221581.1 | SR\hat{ }TGS*ESSQTGASATSG | 958 | Eif4b | Eukaryotic translation initiation | 1.2845 |
| | R\hat{ } | | | factor 4B | |
| IPI:IPI00454104.1 | TTEAPCSPGS*QQPPS*PDE | 959 | Scrib | Isoform 1 of Protein LAP4 | 1.2842 |
| | LPANVK@ | | | | |
| IPI:IPI00454104.1 | TTEAPCS*PGSQQPPS*PDE | 960 | Scrib | Isoform 1 of Protein LAP4 | 1.2842 |
| | LPANVK | | | | |
| IPI:IPI00454104.1 | TTEAPCS*PGSQQPPS*PDE | 961 | Scrib | Isoform 1 of Protein LAP4 | 1.2842 |
| | LPANVK | | | | |
| IPI:IPI00320905.7 | LGEQGPEPGPTPPQT*PT*P | 962 | Arhgap17 | Isoform 1 of Rho GTPase-activating | 1.2828 |
| | PST*PPLAK@ | | | protein 17 | |
| IPI:IPI00381495.5 | TVSS*PIPYTPS*PSSSR\hat{ }PIS | 963 | Ccdc6 | coiled-coil domain containing 6 | 1.2808 |
| | *PGLSYASHTVGFTPPTS*L | | | | |
| | TR\hat{ } | | | | |
| IPI:IPI00381495.5 | TVSS*PIPYTPS*PSS*SR | 964 | Ccdc6 | coiled-coil domain containing 6 | 1.2808 |
| | PISPGLSYASHTVGFT* | | | | |
| | PPTSLTR | | | | |
| IPI:IPI00381495.5 | TVSS*PIPYTPS*PSSSRPIS | 965 | Ccdc6 | coiled-coil domain containing 6 | 1.2808 |
| | PGLS*YASHTVGFT*PPTSL | | | | |
| | TR | | | | |
| IPI:IPI00309059.7 | RSTS*PIIGS*PPVR | 966 | Patl1 | Protein PAT1 homolog 1 | 1.2745 |
| IPI:IPI00336973.2 | GLNLDGT*PALSTLGGFS*P | 967 | Ccnl1 | Isoform 1 of Cyclin-L1 | 1.273 |
| | ASK@PS*SPR\hat{ } | | | | |
| IPI:IPI00336973.2 | GLNLDGT*PALSTLGGFS*P | 968 | Ccnl1 | Isoform 1 of Cyclin-L1 | 1.273 |
| | ASKPSS*PR | | | | |
| IPI:IPI00309059.7 | R\hat{ }STS*PIIGS*PPVR\hat{ } | 969 | Patl1 | Protein PAT1 homolog 1 | 1.2725 |
| IPI:IPI00309059.7 | R\hat{ }STS*PIIGS*PPVR\hat{ } | 970 | Patl1 | Protein PAT1 homolog 1 | 1.2725 |
| IPI:IPI00309059.7 | RSTS*PIIGS*PPVR | 971 | Patl1 | Protein PAT1 homolog 1 | 1.2725 |
| IPI:IPI00309059.7 | R\hat{ }STS*PIIGS*PPVR\hat{ } | 972 | Patl1 | Protein PAT1 homolog 1 | 1.2723 |
| IPI:IPI00309059.7 | RSTS*PIIGS*PPVR | 973 | Patl1 | Protein PAT1 homolog 1 | 1.2723 |
| IPI:IPI00309059.7 | R\hat{ }STS*PIIGS*PPVR\hat{ } | 974 | Patl1 | Protein PAT1 homolog 1 | 1.2723 |
| IPI:IPI00309059.7 | RSTS*PIIGS*PPVR | 975 | Patl1 | Protein PAT1 homolog 1 | 1.2723 |
| IPI:IPI00129264.1 | ATSR\hat{ }PINLGPS*SPNTEIHW | 976 | Sorbs3 | Vinexin | 1.2719 |
| | TPYR\hat{ } | | | | |
| IPI:IPI00318938.6 | NS*PVAK@T*PPK@DLPAIP | 977 | Eif4ebp1 | Eukaryotic translation initiation | 1.2719 |
| | GVTSPTSDEPPM#QASQSQ | | | factor 4E-binding protein 1 | |
| | LPSSPEDK@ | | | | |
| IPI:IPI00115492.1 | HSLSSESQAPEDIAPPGS*S | 978 | Eps8l2 | Isoform 1 of Epidermal growth factor | 1.2678 |
| | PHANR\hat{ } | | | receptor kinase substrate 8-like | |
| | | | | protein 2 | |
| IPI:IPI00381495.5 | TVSS*PIPYTPS*PSSSR\hat{ }PIS | 979 | Ccdc6 | coiled-coil domain containing 6 | 1.2638 |
| | *PGLSYASHTVGFT*PPTSL | | | | |
| | TR\hat{ } | | | | |
| IPI:IPI00381495.5 | TVSS*PIPYTPS*PSSSRP | 980 | Ccdc6 | coiled-coil domain containing 6 | 1.2638 |
| | IS*PGLSYASHTVGFT* | | | | |
| | PPTSLTR | | | | |
| IPI:IPI00381495.5 | TVSS*PIPYTPS*PSSSRP | 981 | Ccdc6 | coiled-coil domain containing 6 | 1.2638 |
| | IS*PGLSYASHTVGFT* | | | | |
| | PPTSLTR | | | | |
| IPI:IPI00381495.5 | TVSS*PIPYTPSPSS*SR\hat{ }PIS | 982 | Ccdc6 | coiled-coil domain containing 6 | 1.2638 |
| | PGLSYAS*HTVGFTPPTS*L | | | | |
| | TR\hat{ } | | | | |
| IPI:IPI00133917.1 | YAQGFLPEK@PPQQDHTT* | 983 | Phc2 | Isoform 1 of Polyhomeotic-like | 1.2624 |
| | TTDSEMEEPYLQESK@EE | | | protein 2 | |
| | GTPLK@ | | | | |
| IPI:IPI00227209.3 | R\hat{ }LS*S*TSLASGHSVR\hat{ } | 984 | Prkd2 | Serine/threonine-protein kinase D2 | 1.2605 |
| IPI:IPI00318938.6 | VALGDGVQLPPGDYSTT*P | 985 | Eif4ebp1 | Eukaryotic translation initiation | 1.2599 |
| | GGTLFST*TPGGTR\hat{ } | | | factor 4E-binding protein 1 | |
| IPI:IPI00230368.1 | SSS*LGNS*PDR\hat{ }GPLR\hat{ }PF | 986 | 2610110G12Rik | Isoform 1 of UPF0635 protein C6orf134 | 1.2571 |
| | VPEQELLR\hat{ } | | | homolog | |
| IPI:IPI00845596.1 | LFS*QGQDVSDK@VK@ | 987 | Mllt4 | Isoform 3 of Afadin | 1.2551 |
| IPI:IPI00378026.4 | VSSPSCDS*QGLHPEEAPS* | 988 | Nacc1 | Nucleus accumbens-associated protein 1 | 1.253 |
| | SEPQSPVAQTLGWPACSTP | | | | |
| | LPLVSR\hat{ } | | | | |
| IPI:IPI00458460.1 | SLS*ESS*VVMDR\hat{ } | 989 | Zfp106 | Isoform 1 of Zinc finger protein 106 | 1.2522 |
| IPI:IPI00399440.2 | HLEDAGST*PS*IGENDLK@ | 990 | Rictor | Isoform 1 of Rapamycin-insensitive | 1.2463 |
| | FPK@ | | | companion of mTOR | |
| IPI:IPI00109318.1 | TVAISDAAQLPQDYCTT*PG | 991 | Eif4ebp2 | Eukaryotic translation initiation | 1.2423 |
| | GTLFSTT*PGGTR\hat{ }IIYDR\hat{ }K@ | | | factor 4E-binding protein 2 | |
| IPI:IPI00109318.1 | TVAISDAAQLPQDYCTT*PG | 992 | Eif4ebp2 | Eukaryotic translation initiation | 1.2423 |
| | GTLFST*TPGGTRIIYDRK | | | factor 4E-binding protein 2 | |
| IPI:IPI00379682.1 | R\hat{ }ANTLS*HFPVECPAPPEP | 993 | Tbc1d1 | Isoform 1 of TBC1 domain family | 1.2355 |
| | AQS*SPGVSQR\hat{ } | | | member 1 | |
| IPI:IPI00454104.1 | TTEAPCS*PGSQQPPS*PDE | 994 | Scrib | Isoform 1 of Protein LAP4 | 1.2352 |
| | LPANVK | | | | |
| IPI:IPI00454104.1 | TTEAPCS*PGSQQPPS*PDE | 995 | Scrib | Isoform 1 of Protein LAP4 | 1.2352 |
| | LPANVK@ | | | | |
| IPI:IPI00454104.1 | TTEAPCS*PGSQQPPS*PDE | 996 | Scrib | Isoform 1 of Protein LAP4 | 1.2352 |
| | LPANVK@ | | | | |
| IPI:IPI00109318.1 | TVAISDAAQLPQDYCT*TPG | 997 | Eif4ebp2 | Eukaryotic translation initiation | 1.2336 |
| | GTLFSTT*PGGTR\hat{ }IIYDR\hat{ }K@ | | | factor 4E-binding protein 2 | |
| IPI:IPI00378438.6 | S*QSVPGAWPGASPLSSQP | 998 | Tns1 | tensin 1 | 1.2303 |
| | LLGSS*R\hat{ }QSHPLTQSR\hat{ } | | | | |
| IPI:IPI00118143.1 | KQT*PPAS*PS*PQPIEDRPP | 999 | Cttn | Src substrate cortactin | 1.2254 |
| | SS*PIYEDAAPFKAEPSYR | | | | |
| IPI:IPI00330773.3 | ASYSGTSPS*HSFISGEPDR\hat{ } | 1000 | Phldb2 | Isoform 1 of Pleckstrin homology-like | 1.2251 |
| | | | | domain family B member 2 | |
| IPI:IPI00330773.3 | ASYSGTS*PSHSFISGEPDR\hat{ } | 1001 | Phldb2 | Isoform 1 of Pleckstrin homology-like | 1.2251 |
| | | | | domain family B member 2 | |
| IPI:IPI00127071.3 | GATEEEQQDS*GS*EPR\hat{ }G | 1002 | Ddx41 | Probable ATP-dependent RNA helicase | 1.223 |
| | DEDDIPLGPQSNVSLLDQH | | | DDX41 | |
| | QHLK@ | | | | |
| IPI:IPI00153986.2 | GTSR\hat{ }PGT*PS*AEAASTSS | 1003 | Gtf2f1 | General transcription factor IIF | 1.2226 |
| | TLR\hat{ } | | | subunit 1 | |
| IPI:IPI00153986.2 | GTS*R\hat{ }PGT*PSAEAASTSS | 1004 | Gtf2f1 | General transcription factor IIF | 1.2226 |
| | TLR\hat{ } | | | subunit 1 | |
| IPI:IPI00153986.2 | GTS*RPGT*PSAEAASTSST | 1005 | Gtf2f1 | General transcription factor IIF | 1.2226 |
| | LR | | | subunit 1 | |
| IPI:IPI00117277.2 | R\hat{ }GS*GDTSISMDTEASIR\hat{ } | 1006 | Lrrfip1 | Isoform 2 of Leucine-rich repeat | 1.2213 |
| | | | | flightless-interacting protein 1 | |
| IPI:IPI00661508.3 | LYSLLGIDLTAPSNNS*SPR\hat{ } | 1007 | Sbno1 | Isoform 2 of Protein strawberry notch | 1.2147 |
| | DS*PCK@ENK@ | | | homolog 1 | |
| IPI:IPI00318938.6 | NS*PVAKT*PPKDLPAIPGVT | 1008 | Eif4ebp1 | Eukaryotic translation initiation | 1.2095 |
| | *SPTSDEPPMQASQSQLPS | | | factor 4E-binding protein 1 | |
| | S*PEDK | | | | |
| IPI:IPI00116442.1 | TRLAS*ES*ANDDNEDS | 1009 | Hdgfrp2 | Isoform 3 of Hepatoma derived growth | 1.1963 |
| | | | | factor-related protein 2 | |
| IPI:IPI00116442.1 | TRLAS*ES*ANDDNEDS | 1010 | Hdgfrp2 | Isoform 3 of Hepatoma-derived growth | 1.1963 |
| | | | | factor-related protein 2 | |
| IPI:IPI00929761.1 | R\hat{ }CPS*QSSSR\hat{ }PATGISQP | 1011 | Larp1 | Isoform 2 of La-related protein 1 | 1.1959 |
| | PTTPTGQATR\hat{ } | | | | |
| IPI:IPI00320905.7 | LGEQGPEPGPT*PPQT*PT* | 1012 | Arhgap17 | Isoform 1 of Rho GTPase-activating | 1.1918 |
| | PPS*TPPLAK@ | | | protein 17 | |
| IPI:IPI00420509.2 | S*IEDLQPPNALSAPFTNS | 1013 | Fmnl3 | Isoform 1 of Formin-like protein 3 | 1.1892 |
| | LAR | | | | |
| IPI:IPI00153986.2 | GTS*RPGT*PSAEAASTSST | 1014 | Gtf2f1 | General transcription factor IIF | 1.1888 |
| | | | | subunit 1 | |
| IPI:IPI00153986.2 | GT*SR\hat{ }PGT*PSAEAASTSS | 1015 | Gtf2f1 | General transcription factor IIF | 1.1888 |
| | TLR\hat{ } | | | subunit 1 | |
| IPI:IPI00153986.2 | GTS*RPGT*PSAEAASTSST | 1016 | Gtf2f1 | General transcription factor IIF | 1.1888 |
| | LR | | | subunit 1 | |
| IPI:IPI00153986.2 | GTS*R\hat{ }PGTPS*AEAASTSS | 1017 | Gtf2f1 | General transcription factor IIF | 1.1888 |
| | TLR\hat{ } | | | subunit 1 | |
| IPI:IPI00320905.7 | LGEQGPEPGPT*PPQT*PT* | 1018 | Arhgap17 | Isoform 1 of Rho GTPase-activating | 1.1882 |
| | PPST*PPLAK | | | protein 17 | |
| IPI:IPI00330773.3 | ASYSGTS*PSHSFISGEPDR | 1019 | Phldb2 | Isoform 1 of Pleckstrin homology-like | 1.1879 |
| | | | | domain family B member 2 | |
| IPI:IPI00330773.3 | ASYSGTSPS*HSFISGEPDR\hat{ } | 1020 | Phldb2 | Isoform 1 of Pleckstrin homology-like | 1.1879 |
| | | | | domain family B member 2 | |
| IPI:IPI00330773.3 | ASYSGTS*PSHSFISGEPDR\hat{ } | 1021 | Phldb2 | Isoform 1 of Pleckstrin homology-like | 1.1879 |
| | | | | domain family B member 2 | |
| IPI:IPI00330773.3 | SDELLGDLTRT*PPSSSAAF | 1022 | Phldb2 | Isoform 1 of Pleckstrin homology-like | 1.185 |
| | LK | | | domain family B member 2 | |
| IPI:IPI00330773.3 | SDELLGDLTR\hat{ }T*PPSSSAA | 1023 | Phldb2 | Isoform 1 of Pleckstrin homology-like | 1.185 |
| | FLK@ | | | domain family B member 2 | |
| IPI:IPI00340860.5 | TAS*EGS*EAETPEAPK@Q | 1024 | Larp7 | Isoform 1 of La-related protein 7 | 1.1845 |
| | PAK@K@ | | | | |
| IPI:IPI00340860.5 | TAS*EGS*EAETPEAPK@Q | 1025 | Larp7 | Isoform 1 of La-related protein 7 | 1.1845 |
| | PAK@K@ | | | | |
| IPI:IPI00129264.1 | ATSRPINLGPSS*PNTEIHW | 1026 | Sorbs3 | Vinexin | 1.175 |
| | TPYR | | | | |
| IPI:IPI00129264.1 | ATSR\hat{ }PINLGPSS*PNTEIHW | 1027 | Sorbs3 | Vinexin | 1.175 |
| | TPYR\hat{ } | | | | |
| IPI:IPI00129264.1 | ATSRPINLGPS*SPNTEIHW | 1028 | Sorbs3 | Vinexin | 1.175 |
| | TPYR | | | | |
| IPI:IPI00381495.5 | T*VSSPIPYTPS*PSSS*R\hat{ }PI | 1029 | Ccdc6 | coiled-coil domain containing 6 | 1.1749 |
| | SPGLSYASHTVGFT*PPTSL | | | | |
| | TR\hat{ } | | | | |
| IPI:IPI00153986.2 | GTS*R\hat{ }PGT*PSAEAASTSS | 1030 | Gtf2f1 | General transcription factor IIF | 1.1748 |
| | TLR\hat{ } | | | subunit 1 | |
| IPI:IPI00153986.2 | GTS*RPGT*PSAEAASTSST | 1031 | Gtf2f1 | General transcription factor IIF | 1.1748 |
| | LR | | | subunit 1 | |
| IPI:IPI00153986.2 | GTS*R\hat{ }PGT*PSAEAASTSS | 1032 | Gtf2f1 | General transcription factor IIF | 1.1748 |
| | TLR\hat{ } | | | subunit 1 | |
| IPI:IPI00153986.2 | GTS*RPGT*PSAEAASTSST | 1033 | Gtf2f1 | General transcription factor IIF | 1.1748 |
| | LR | | | subunit 1 | |
| IPI:IPI00136572.4 | YEENPAWPGTSTHNGPNG | 1034 | Zc3hav1 | Isoform 1 of Zinc finger CCCH-type | 1.1738 |
| | FSQIMDETPNVSK@SS*PT | | | antiviral protein 1 | |
| | GFGIK@ | | | | |
| IPI:IPI00225062.2 | GSLS*R\hat{ }SS*S*PVTELTAR\hat{ } | 1035 | Srrm2 | Isoform 3 of Serine/arginine repetitive | 1.1701 |
| | | | | matrix protein 2 | |
| IPI:IPI00133685.1 | S*LPVSVPVWAFK@ | 1036 | Akt1s1 | Proline-rich AKT1 substrate 1 | 1.1669 |
| IPI:IPI00133685.1 | S*LPVSVPVWAFK@ | 1037 | Akt1s1 | Proline-rich AKT1 substrate 1 | 1.1669 |
| IPI:IPI00133685.1 | S*LPVSVPVWAFK@ | 1038 | Akt1s1 | Proline-rich AKT1 substrate 1 | 1.1669 |
| IPI:IPI00225062.2 | GSLS*RSS*S*PVTELTAR | 1039 | Srrm2 | Isoform 3 of Serine/arginine repetitive | 1.1669 |
| | | | | matrix protein 2 | |
| IPI:IPI00225062.2 | GSLS*R\hat{ }SS*S*PVTELTAR\hat{ } | 1040 | Srrm2 | Isoform 3 of Serine/arginine repetitive | 1.1669 |
| | | | | matrix protein 2 | |
| IPI:IPI00929786.1 | S*LPTTVPESPNYR\hat{ } | 1041 | Larp1 | Isoform 1 of La-related protein 1 | 1.1655 |
| IPI:IPI00929786.1 | S*LPTTVPESPNYR | 1042 | Larp1 | Isoform 1 of La-related protein 1 | 1.1655 |
| IPI:IPI00116442.1 | TRLAS*ES*ANDDNEDS | 1043 | Hdgfrp2 | Isoform 3 of Hepatoma-derived growth | 1.1626 |
| | | | | factor-related protein 2 | |
| IPI:IPI00116442.1 | TR\hat{ }LAS*ES*ANDDNEDS | 1044 | Hdgfrp2 | Isoform 3 of Hepatoma-derived growth | 1.1626 |
| | | | | factor-related protein 2 | |
| IPI:IPI00116442.1 | TR\hat{ }LAS*ES*ANDDNEDS | 1045 | Hdgfrp2 | Isoform 3 of Hepatoma-derived growth | 1.1626 |
| | | | | factor-related protein 2 | |
| IPI:IPI00116442.1 | TRLAS*ES*ANDDNEDS | 1046 | Hdgfrp2 | Isoform 3 of Hepatoma-derived growth | 1.1626 |
| | | | | factor-related protein 2 | |
| IPI:IPI00317599.3 | SQEDEEEIST*SPGVSEFVS | 1047 | Syap1 | Synapse-associated protein 1 | 1.1567 |
| | DAFDTCSLNQEDLRK | | | | |
| IPI:IPI00317599.3 | SQEDEEEISTS*PGVSEFVS | 1048 | Syap1 | Synapse-associated protein 1 | 1.1567 |
| | DAFDTCSLNQEDLR\hat{ }K@ | | | | |
| IPI:IPI00317599.3 | SQEDEEEISTS*PGVSEFVS | 1049 | Syap1 | Synapse-associated protein 1 | 1.1567 |
| | DAFDTCSLNQEDLR\hat{ }K@ | | | | |
| IPI:IPI00317599.3 | SQEDEEEISTS*PGVSEFVS | 1050 | Syap1 | Synapse-associated protein 1 | 1.1567 |
| | DAFDTCSLNQEDLRK | | | | |
| IPI:IPI00126124.2 | T*FSECS*YPETEEEAEALP | 1051 | St5 | Isoform 1 of Suppression of | 1.1565 |
| | GR\hat{ } | | | tumorigenicity 5 | |
| IPI:IPI00312600.2 | LSSDENSNPDLS*GDENDD | 1052 | Eed | Isoform 1 of Polycomb protein EED | 1.1553 |
| | AVSIESGTNTER\hat{ }PDTPTNT | | | | |
| | PNAPGR\hat{ }K@ | | | | |
| IPI:IPI00312600.2 | LSSDENSNPDLS*GDENDD | 1053 | Eed | Isoform 1 of Polycomb protein EED | 1.1553 |
| | AVSIESGTNTERPDTPTNTP | | | | |
| | NAPGRK | | | | |
| IPI:IPI00229990.7 | RPPGDVLETFNFLENADDS* | 1054 | Strn3 | Striatin-3 | 1.1544 |
| | DEEENDMIEGIPEGKDK | | | | |
| IPI:IPI00229990.7 | R\hat{ }PPGDVLETFNFLENADDS | 1055 | Strn3 | Striatin-3 | 1.1544 |
| | *DEEENDMIEGIPEGK@DK@ | | | | |
| IPI:IPI00121418.1 | DGEGPDNLEPACPLSLPLQ | 1056 | Rb1 | Retinoblastoma-associated protein | 1.152 |
| | GNHTAADMYLS*PLRS*PK | | | | |
| IPI:IPI00121418.1 | DGEGPDNLEPACPLSLPLQ | 1057 | Rb1 | Retinoblastoma-associated protein | 1.152 |
| | GNHTAADMYLS*PLR\hat{ }S*PK@ | | | | |
| IPI:IPI00121418.1 | DGEGPDNLEPACPLSLPLQ | 1058 | Rb1 | Retinoblastoma-associated protein | 1.152 |
| | GNHTAADMYLS*PLR\hat{ }S*PK@ | | | | |
| IPI:IPI00136386.2 | GDT*S*ET*ASAT*PAY*R\hat{ } | 1059 | Tssk4 | Isoform 2 of Testis-specific | 1.15 |
| | | | | serine/threonine-protein kinase 4 | |
| IPI:IPI00515576.5 | TGVNENTVVSAGKDLSTS*P | 1060 | Ehbp1 | Isoform 2 of EH domain-binding | 1.1492 |
| | KPS*PIPS*PVLGQKPNASQ | | | protein 1 | |
| | SLLAWCR | | | | |
| IPI:IPI00420143.1 | STSSVDSDILSSSHS*S*DTL | 1061 | Usp47 | Isoform 2 of Ubiquitin carboxyl- | 1.1474 |
| | CNADSAQIPLANGLDSHSIT | | | terminal hydrolase 47 | |
| | SSR\hat{ } | | | | |
| IPI:IPI00109318.1 | TVAISDAAQLPQDYCTT*PG | 1062 | Eif4ebp2 | Eukaryotic translation initiation | 1.147 |
| | GTLFSTT*PGGTRIIYDRK | | | factor 4E-binding protein 2 | |
| IPI:IPI00109318.1 | TVAISDAAQLPQDYCT*TPG | 1063 | Eif4ebp2 | Eukaryotic translation initiation | 1.147 |
| | GTLFSTT*PGGTR\hat{ }IIYDR\hat{ }K@ | | | factor 4E-binding protein 2 | |
| IPI:IPI00330773.3 | SDELLGDLTR\hat{ }T*PPSSSAA | 1064 | Phldb2 | Isoform 1 of Pleckstrin homology-like | 1.1466 |
| | FLK@ | | | domain family B member 2 | |
| IPI:IPI00330773.3 | SDELLGDLTRT*PPSSSAAF | 1065 | Phldb2 | Isoform 1 of Pleckstrin homology-like | 1.1466 |
| | LK | | | domain family B member 2 | |
| IPI:IPI00229697.3 | GT*FSDQELDAQS*LDDEDD | 1066 | — | 68 kDa protein | 1.1465 |
| | SLQHAVHPALNRFS*PS*PR | | | | |
| IPI:IPI00133685.1 | S*LPVSVPVWAFK@ | 1067 | Akt1s1 | Proline-rich AKT1 substrate 1 | 1.1417 |
| IPI:IPI00133685.1 | S*LPVSVPVWAFK | 1068 | Akt1s1 | Proline-rich AKT1 substrate 1 | 1.1417 |
| IPI:IPI00133685.1 | S*LPVSVPVWAFK@ | 1069 | Akt1s1 | Proline-rich AKT1 substrate 1 | 1.1417 |
| IPI:IPI00133685.1 | S*LPVSVPVWAFK | 1070 | Akt1s1 | Proline-rich AKT1 substrate 1 | 1.1417 |
| IPI:IPI00130920.1 | SLMSS*PEDLTK@DFEELK | 1071 | Mtap1b | Microtubule-associated protein 1B | 1.1401 |
| | @AEEIDVAK@ | | | | |
| IPI:IPI00130920.1 | SLMSSPEDLT*KDFEELKAE | 1072 | Mtap1b | Microtubule-associated protein 1B | 1.1401 |
| | EIDVAK | | | | |
| IPI:IPI00828355.1 | GTLVHTT*SDSDS*EDGDQE | 1073 | Fmn1 | Isoform 5 of Formin-1 | 1.1401 |
| | AEEESSLDTQK@PTTVVLC | | | | |
| | EPSQEPK@ | | | | |
| IPI:IPI00381495.5 | T*VSSPIPYTPSPS*SSR\hat{ }PIS | 1074 | Ccdc6 | coiled-coil domain containing 6 | 1.1376 |
| | PGLSYASHT*VGFT*PPTSL | | | | |
| | TR\hat{ } | | | | |
| IPI:IPI00929761.1 | CPS*QSSSRPATGISQPPTT | 1075 | Larp1 | Isoform 2 of La-related protein 1 | 1.1372 |
| | PTGQATR | | | | |
| IPI:IPI00379682.1 | R\hat{ }ANTLS*HFPVECPAPPEP | 1076 | Tbc1d1 | Isoform 1 of TBC1 domain family | 1.1351 |
| | AQSS*PGVSQR\hat{ } | | | member 1 | |
| IPI:IPI00379682.1 | RANT*LSHFPVECPAPPEPA | 1077 | Tbc1d1 | Isoform 1 of TBC1 domain family | 1.1351 |
| | QSS*PGVSQR | | | member 1 | |
| IPI:IPI00381495.5 | T*VSSPIPYTPSPSS*SR\hat{ }PIS | 1078 | Ccdc6 | coiled-coil domain containing 6 | 1.1342 |
| | PGLS*YASHTVGFT*PPTSL | | | | |
| | TR\hat{ } | | | | |
| IPI:IPI00381495.5 | T*VSSPIPYTPS*PSSSRPIS | 1079 | Ccdc6 | coiled-coil domain containing 6 | 1.1342 |
| | PGLSYASHT*VGFT*PPTSL | | | | |
| | TR | | | | |
| IPI:IPI00225062.2 | M#SCFS*R\hat{ }PSMS*PTPLDR\hat{ } | 1080 | Srrm2 | Isoform 3 of Serine/arginine repetitive | 1.1322 |
| | | | | matrix protein 2 | |
| IPI:IPI00133374.5 | EVDPSTGELQS*LQMPES*E | 1081 | Sqstm1 | Isoform 1 of Sequestosome-1 | 1.1315 |
| | GPS*SLDPSQEGPTGLK@ | | | | |
| IPI:IPI00133374.5 | EVDPSTGELQS*LQMPES*E | 1082 | Sqstm1 | Isoform 1 of Sequestosome-1 | 1.1315 |
| | GPS*SLDPSQEGPTGLK@ | | | | |
| IPI:IPI00133374.5 | EVDPSTGELQS*LQMPES*E | 1083 | Sqstm1 | Isoform 1 of Sequestosome-1 | 1.1315 |
| | GPS*SLDPSQEGPTGLK@ | | | | |
| IPI:IPI00133374.5 | EVDPSTGELQS*LQMPES*E | 1084 | Sqstm1 | Isoform 1 of Sequestosome-1 | 1.1315 |
| | GPS*SLDPSQEGPTGLK | | | | |
| IPI:IPI00465879.2 | LCS*SSS*SDTSPR\hat{ } | 1085 | Zc3hc1 | Isoform 1 of Nuclear-interacting | 1.1277 |
| | | | | partner of ALK | |
| IPI:IPI00468802.5 | YEMACAIADAFNLPSSHLR\hat{ } | 1086 | Mat2b | Isoform 1 of Methionine | 1.1262 |
| | PITDS*PVIGAQR\hat{ }PK@ | | | adenosyltransferase 2 subunit beta | |
| IPI:IPI00121251.7 | LSTTPS*PTNS*LHEDGVDD | 1087 | Tox4 | TOX high mobility group box family | 1.1209 |
| | FR\hat{ }R\hat{ } | | | member 4 | |
| IPI:IPI00121251.7 | LSTTPS*PTNS*LHEDGVDD | 1088 | Tox4 | TOX high mobility group box family | 1.1209 |
| | FR\hat{ }R\hat{ } | | | member 4 | |
| IPI:IPI00121251.7 | LSTTPS*PTNS*LHEDGVDD | 1089 | Tox4 | TOX high mobility group box family | 1.1209 |
| | FRR | | | member 4 | |
| IPI:IPI00127554.1 | R\hat{ }FS*VQEQDWETT*PPK@ | 1090 | Emg1 | Probable ribosome biogenesis protein | 1.1179 |
| | K@ | | | NEP1 | |
| IPI:IPI00127554.1 | RFS*VQEQDWET*TPPKK | 1091 | Emg1 | Probable ribosome biogenesis protein | 1.1179 |
| | | | | NEP1 | |
| IPI:IPI00459443.5 | GEGVSQVGPGTPPAPES*P | 1092 | Tnks1bp1 | 182 kDa tankyrase-1-binding protein | 1.1175 |
| | RKPISGVQGNDPGISLPQR | | | | |
| IPI:IPI00225062.2 | MELGT*PLR\hat{ }HSGSTS*PYP | 1093 | Srrm2 | Isoform 3 of Serine/arginine repetitive | 1.1138 |
| | K@ | | | matrix protein 2 | |
| IPI:IPI00225062.2 | MELGT*PLRHSGST*SPYPK | 1094 | Srrm2 | Isoform 3 of Serine/arginine repetitive | 1.1138 |
| | | | | matrix protein 2 | |
| IPI:IPI00225062.2 | MELGT*PLR\hat{ }HSGSTS*PYP | 1095 | Srrm2 | Isoform 3 of Serine/arginine repetitive | 1.1138 |
| | K@ | | | matrix protein 2 | |
| IPI:IPI00127764.2 | EIS*QSR\hat{ }NPS*VSEHLPDEK@ | 1096 | Pcm1 | Isoform 1 of Pericentriolar material 1 | 1.1126 |
| | | | | protein | |
| IPI:IPI00318938.6 | NS*PVAK@T*PPK@DLPAIP | 1097 | Eif4ebp1 | Eukaryotic translation initiation | 1.1074 |
| | GVTSPTSDEPPMQASQSQL | | | factor 4E-binding protein 1 | |
| | PSS*PEDK@ | | | | |
| IPI:IPI00116923.2 | SGFAR\hat{ }PGDLEFEDFS*QVI | 1098 | Trip10 | Isoform 3 of Cdc42-interacting | 1.1069 |
| | NR\hat{ }VPSDSSLGT*PDGR\hat{ }PE | | | protein 4 | |
| | LR\hat{ } | | | | |
| IPI:IPI00121335.1 | CGS*PSDSSTSEMMEVAVN | 1099 | LOC100048123; | RAC-beta serine/threonine-protein | 1.1028 |
| | K@ | | Akt2 | kinase | |
| IPI:IPI00356608.4 | VGS*LT*PPS*SPK@ | 1100 | Aak1 | Isoform 2 of AP2-associated protein | 1.1012 |
| | | | | kinase 1 | |
| IPI:IPI00828461.1 | GPPDFS*SDEER\hat{ }EPT*PVL | 1101 | Tmpo | thymopoietin isoform delta | 1.1001 |
| | GSGASVGR\hat{ } | | | | |
| IPI:IPI00381495.5 | TVSSPIPYTPS*PS*SSR\hat{ }PIS | 1102 | Ccdc6 | coiled-coil domain containing 6 | 1.0993 |
| | PGLSYASHTVGFTPPTSLTR\hat{ } | | | | |
| IPI:IPI00381495.5 | TVSSPIPYTPS*PSSSRPISP | 1103 | Ccdc6 | coiled-coil domain containing 6 | 1.0993 |
| | GLSY*ASHTVGFTPPTSLTR | | | | |
| IPI:IPI00127554.1 | R\hat{ }FS*VQEQDWETTPPK@K@ | 1104 | Emg1 | Probable ribosome biogenesis protein | 1.0981 |
| | | | | NEP1 | |
| IPI:IPI00127554.1 | R\hat{ }FS*VQEQDWETTPPK@K@ | 1105 | Emg1 | Probable ribosome biogenesis protein | 1.0981 |
| | | | | NEP1 | |
| IPI:IPI00121251.7 | LSTT*PSPTNS*LHEDGVDD | 1106 | Tox4 | TOX high mobility group box family | 1.0844 |
| | FRR | | | member 4 | |
| IPI:IPI00121251.7 | LSTTPS*PTNS*LHEDGVDD | 1107 | Tox4 | TOX high mobility group box family | 1.0844 |
| | FR\hat{ }R\hat{ } | | | member 4 | |
| IPI:IPI00121251.7 | LSTTPS*PTNS*LHEDGVDD | 1108 | Tox4 | TOX high mobility group box family | 1.0844 |
| | FR\hat{ }R\hat{ } | | | member 4 | |
| IPI:IPI00318938.6 | NS*PVAK@T*PPK@DLPAIP | 1109 | Eif4ebp1 | Eukaryotic translation initiation | 1.0842 |
| | GVTSPTSDEPPMQASQSQL | | | factor 4E-binding protein 1 | |
| | PSS*PEDK@ | | | | |
| IPI:IPI00318938.6 | NS*PVAKT*PPKDLPAIPGVT | 1110 | Eif4ebp1 | Eukaryotic translation initiation | 1.0842 |
| | S*PTSDEPPMQASQSQLPS | | | factor 4E-binding protein 1 | |
| | SPEDK | | | | |
| IPI:IPI00169771.1 | S*SASGTHSES*PEK@LQC | 1111 | BC031781 | UPF0667 protein C1orf55 homolog | 1.0823 |
| | PVTEPGQGILENTGTEPGE | | | | |
| | TSDK@ECNER\hat{ } | | | | |
| IPI:IPI00318938.6 | NS*PVAK@T*PPK@DLPAIP | 1112 | Eif4ebp1 | Eukaryotic translation initiation | 1.0778 |
| | GVTSPTSDEPPMQASQSQL | | | factor 4E-binding protein 1 | |
| | PSS*PEDK@ | | | | |
| IPI:IPI00127764.2 | EISQS*RNPS*VSEHLPDEK | 1113 | Pcm1 | Isoform 1 of Pericentriolar material 1 | 1.074 |
| | | | | protein | |
| IPI:IPI00112597.1 | SQSS*EGVSSLSSS*PSNSL | 1114 | | | 1.0712 |
| | ETQSQSLSR\hat{ } | | | | |
| IPI:IPI00112597.1 | SQS*SEGVSSLSSS*PSNSL | 1115 | | | 1.0712 |
| | ETQSQSLSR\hat{ } | | | | |
| IPI:IPI00225062.2 | S*RSSSPDS*KMELGTPLR | 1116 | Srrm2 | Isoform 3 of Serine/arginine repetitive | 1.0696 |
| | | | | matrix protein 2 | |
| IPI:IPI00330773.3 | ASYSGTS*PSHS*FISGEPD | 1117 | Phldb2 | Isoform 1 of Pleckstrin homology-like | 1.0688 |
| | R\hat{ } | | | domain family B member 2 | |
| IPI:IPI00330246.2 | WAAHGTS*PEDFSLTLGAR\hat{ } | 1118 | Phldb1 | Isoform 2 of Pleckstrin homology-like | 1.068 |
| | | | | domain family B member 1 | |
| IPI:IPI00122594.4 | NGVSLFNSPK@T*EQPSPV | 1119 | Ahctf1 | AT-hook-containing transcription | 1.0661 |
| | VHSFPHPELPEAFVGTPISN | | | factor 1 | |
| | TSQR\hat{ } | | | | |
| IPI:IPI00122594.4 | NGVSLFNS*PKTEQPSPVV | 1120 | Ahctf1 | AT-hook-containing transcription | 1.0661 |
| | HSFPHPELPEAFVGTPISNT | | | factor 1 | |
| | SQR | | | | |
| IPI:IPI00122594.4 | NGVSLFNSPK@TEQPSPVV | 1121 | Ahctf1 | AT-hook-containing transcription | 1.0661 |
| | HS*FPHPELPEAFVGTPISN | | | factor 1 | |
| | TSQR\hat{ } | | | | |
| IPI:IPI00121418.1 | DGEGPDNLEPACPLSLPLQ | 1122 | Rb1 | Retinoblastoma-associated protein | 1.0618 |
| | GNHTAADMYLS*PLR\hat{ }S*PK@ | | | | |
| IPI:IPI00121418.1 | DGEGPDNLEPACPLSLPLQ | 1123 | Rb1 | Retinoblastoma-associated protein | 1.0618 |
| | GNHTAADMYLS*PLRS*PK | | | | |
| IPI:IPI00320905.7 | LGEQGPEPGPT*PPQT*PT* | 1124 | Arhgap17 | Isoform 1 of Rho GTPase-activating | 1.0618 |
| | PPST*PPLAK | | | protein 17 | |
| IPI:IPI00403116.9 | NGS*PVPVPDISQEPDGPAL | 1125 | Ncaph2 | Isoform 3 of Condensin-2 complex | 1.0598 |
| | S*GGEEDAEDGAEPLEVAL | | | subunit H2 | |
| | EPAEPR\hat{ } | | | | |
| IPI:IPI00403116.9 | NGS*PVPVPDISQEPDGPAL | 1126 | Ncaph2 | Isoform 3 of Condensin-2 complex | 1.0598 |
| | S*GGEEDAEDGAEPLEVAL | | | subunit H2 | |
| | EPAEPR | | | | |
| IPI:IPI00403116.9 | NGS*PVPVPDIS*QEPDGPA | 1127 | Ncaph2 | Isoform 3 of Condensin-2 complex | 1.0598 |
| | LSGGEEDAEDGAEPLEVAL | | | subunit H2 | |
| | EPAEPR\hat{ } | | | | |
| IPI:IPI00230237.1 | TAVTATNVSAHGSQANS*P | 1128 | Pbx1 | Isoform PBX1b of Pre-B-cell leukemia | 1.054 |
| | STPNSAGGY*PSPCYQPDR | | | transcription factor 1 | |
| | \hat{ }R\hat{ } | | | | |
| IPI:IPI00421139.8 | SS*SHLDPAATPHSTLQGSS | 1129 | Dlg5 | Putative uncharacterized protein | 1.0498 |
| | AGTPEHPSVIDPLMEQDEG | | | | |
| | PGTPPAK@ | | | | |
| IPI:IPI00121251.7 | LSTTPS*PTNS*LHEDGVDD | 1130 | Tox4 | TOX high mobility group box family | 1.0342 |
| | FRR | | | member 4 | |
| IPI:IPI00121251.7 | LSTTPS*PTNS*LHEDGVDD | 1131 | Tox4 | TOX high mobility group box family | 1.0342 |
| | FR\hat{ }R\hat{ } | | | member 4 | |
| IPI:IPI00121431.4 | S*INYSELDQFPSELEK | 1132 | Hells | Isoform 1 of Lymphocyte specific | 1.0332 |
| | | | | helicase | |
| IPI:IPI00121431.4 | S*INYSELDQFPSELEK@ | 1133 | Hells | Isoform 1 of Lymphocyte-specific | 1.0332 |
| | | | | helicase | |
| IPI:IPI00121431.4 | S*INYSELDQFPSELEK@ | 1134 | Hells | Isoform 1 of Lymphocyte-specific | 1.0332 |
| | | | | helicase | |
| IPI:IPI00454039.3 | VGS*EHSLLDPPGK | 1135 | Erbb2ip | Isoform 1 of Protein LAP2 | 1.0307 |
| IPI:IPI00109318.1 | TVAISDAAQLPQDYCTT*PG | 1136 | Eif4ebp2 | Eukaryotic translation initiation | 1.0271 |
| | GTLFSTT*PGGTR\hat{ }IIYDR\hat{ } | | | factor 4E-binding protein 2 | |
| IPI:IPI00109318.1 | TVAISDAAQLPQDYCTT*PG | 1137 | Eif4ebp2 | Eukaryotic translation initiation | 1.0271 |
| | GTLFSTT*PGGTRIIYDR | | | factor 4E-binding protein 2 | |
| IPI:IPI00226228.5 | ANNAGASIYPTGPADPCPP | 1138 | Azi1 | 5-azacytidine-induced protein 1 | 1.0268 |
| | ASES*S*PEQWQSPEDKPQ | | | | |
| | DIHSQGEAR | | | | |
| IPI:IPI00317401.6 | AES*PETSAVESTQST*PQK@ | 1139 | Pds5b | Isoform 1 of Sister chromatid cohesion | 1.0246 |
| | | | | protein PDS5 homolog B | |
| IPI:IPI00317401.6 | AES*PETSAVESTQST*PQK@ | 1140 | Pds5b | Isoform 1 of Sister chromatid cohesion | 1.0246 |
| | | | | protein PDS5 homolog B | |
| IPI:IPI00317401.6 | AES*PETSAVESTQST*PQK | 1141 | Pds5b | Isoform 1 of Sister chromatid cohesion | 1.0246 |
| | | | | protein PDS5 homolog B | |
| IPI:IPI00113389.5 | HNLFEDNM#ALPSESVSS*L | 1142 | Fam129a | Protein Niban | 1.0232 |
| | TDLK | | | | |
| IPI:IPI00318938.6 | NS*PVAK@T*PPK@DLPAIP | 1143 | Eif4ebp1 | Eukaryotic translation initiation | 1.0227 |
| | GVTSPTSDEPPM#QASQSQ | | | factor 4E-binding protein 1 | |
| | LPSSPEDK@ | | | | |
| IPI:IPI00463074.6 | SRS*S*PSTDHYSQEVPVEP | 1144 | Shroom2 | shroom family member 2 | 1.0176 |
| | NR | | | | |
| IPI:IPI00463074.6 | SRS*S*PSTDHYSQEVPVEP | 1145 | Shroom2 | shroom family member 2 | 1.0176 |
| | NR | | | | |
| IPI:IPI00463074.6 | SR\hat{ }S*S*PSTDHYSQEVPVE | 1146 | Shroom2 | shroom family member 2 | 1.0176 |
| | PNR\hat{ } | | | | |
| IPI:IPI00553798.2 | S*NS*FSDERAEFSAPSTPT | 1147 | Ahnak | AHNAK nucleoprotein isoform 1 | 1.0143 |
| | GTLEFAGGDAK@ | | | | |
| IPI:IPI00553798.2 | S*NS*FSDEREFSAPSTPTG | 1148 | Ahnak | AHNAK nucleoprotein isoform 1 | 1.0143 |
| | TLEFAGGDAK | | | | |
| IPI:IPI00553798.2 | S*NS*FSDEREFSAPSTPTG | 1149 | Ahnak | AHNAK nucleoprotein isoform 1 | 1.0143 |
| | TLEFAGGDAK | | | | |
| IPI:IPI00318938.6 | NS*PVAKT*PPKDLPAIPGVT | 1150 | Eif4ebp1 | Eukaryotic translation initiation | 1.0129 |
| | SPT*SDEPPMQASQSQLPS | | | factor 4E-binding protein 1 | |
| | S*PEDK | | | | |
| IPI:IPI00127131.6 | GPS*PSPVGS*PASVAQSR\hat{ } | 1151 | Arid1a | AT rich interactive domain 1A | 1.0107 |
| IPI:IPI00113389.5 | HNLFEDNMALPSES*VSSLT | 1152 | Fam129a | Protein Niban | 1.0048 |
| | DLK@TAMGS*NQAS*PAR\hat{ } | | | | |
| | R\hat{ } | | | | |
| IPI:IPI00113389.5 | HNLFEDNMALPSESVSSLT* | 1153 | Fam129a | Protein Niban | 1.0048 |
| | DLK@TAMGS*NQAS*PAR\hat{ } | | | | |
| | R\hat{ } | | | | |
| IPI:IPI00454109.2 | FPPST*PSEVLS*PTEDPRS* | 1154 | Erf | ETS domain-containing transcription | 1.0039 |
| | PPACSSSSSSLFSAVVAR | | | factor ERF | |
| IPI:IPI00120095.2 | CDGS*PR\hat{ }T*PPS*TPPATAN | 1155 | Samhd1 | SAM domain and HD domain- | 1.0027 |
| | LSADDDFQNTDLR\hat{ } | | | containing protein 1 | |
| IPI:IPI00117229.3 | TS*PAGGTWSSVVSGVPR\hat{ } | 1156 | Atxn2 | ataxin 2 | 1.0015 |
| IPI:IPI00117229.3 | TS*PAGGTWSSVVSGVPR | 1157 | Atxn2 | ataxin 2 | 1.0015 |
| IPI:IPI00320594.5 | SQDSYPGS*PSLS*PR | 1158 | Ranbp10 | Ran-binding protein 10 | 1.0009 |
| IPI:IPI00320594.5 | SQDSYPGS*PSLS*PR\hat{ } | 1159 | Ranbp10 | Ran-binding protein 10 | 1.0009 |
| IPI:IPI00320594.5 | SQDSYPGS*PSLS*PR\hat{ } | 1160 | Ranbp10 | Ran-binding protein 10 | 1.0009 |
| IPI:IPI00320594.5 | SQDS*YPGS*PSLSPR | 1161 | Ranbp10 | Ran-binding protein 10 | 1.0009 |
| IPI:IPI00320594.5 | SQDSYPGS*PSLS*PR\hat{ } | 1162 | Ranbp10 | Ran-binding protein 10 | 1.0009 |
| IPI:IPI00121251.7 | LSTTPS*PTNS*LHEDGVDD | 1163 | Tox4 | TOX high mobility group box family | 1.0005 |
| | FR\hat{ }R\hat{ } | | | member 4 | |
| IPI:IPI00121251.7 | LSTTPS*PTNS*LHEDGVDD | 1164 | Tox4 | TOX high mobility group box family | 1.0005 |
| | FRR | | | member 4 | |

Table 7. Phosphopeptides whose intensities decrease after rapamycin treatment (Rapamycin screen).

TABLE 8

| | | | | | |
|---|---|---|---|---|---|
| | | | | | Log2 |
| | | SEQ | | | Area |
| | | ID | Gene | | (H/L) |
| Reference | Ascore Seq | NO | Name | Annotation | Ratio |

Ku (light cells: control (rapamycin treated); heavy cells: treated with
rapamycin + Ku-0063794. L, light; H, heavy)

| | | | | | |
|---|---|---|---|---|---|
| IPI:IPI00648918.3 | DQEEELDEQAGS*IQM#LEQ | 1165 | Myo18a | Isoform 4 of Myosin-XVIIIa | −7.171 |
| | LK | | | | |
| IPI:IPI00318938.6 | VALGDGVQLPPGDYSTT*P | 1166 | Eif4ebp1 | Eukaryotic translation | −7.159 |
| | GGTLFSTT*PGGTR | | | initiation factor 4E-binding protein 1 | |
| IPI:IPI00318938.6 | VALGDGVQLPPGDYS*TT*P | 1167 | Eif4ebp1 | Eukaryotic translation initiation | −7.127 |
| | GGTLFSTTPGGTR | | | factor 4E-binding protein 1 | |
| IPI:IPI00622700.2 | TAPPVLPTGYDS*EEEEESR | 1168 | Brd2 | Isoform 2 of Bromodomain-containing | −6.823 |
| | \hat{ }PMSYDEK@ | | | protein 2 | |
| IPI:IPI00458153.2 | ENPPSPPT*SPAAPQPR\hat{ } | 1169 | 6330577E15Rik | Uncharacterized protein C10orf78 | −6.819 |
| | | | | homolog | |
| IPI:IPI00454090.1 | DSVDLQS*LM#TEM#NR | 1170 | Best3 | Bestrophin-3 | −6.498 |
| IPI:IPI00274140.4 | LSPFFTLDLS*PTDDKSSKP | 1171 | Grit | Isoform 2 of Rho/Cdc42/Rac GTPase- | −6.465 |
| | SSFTEK | | | activating protein RICS | |
| IPI:IPI00929786.1 | SLPT*TVPES*PNYR | 1172 | Larp1 | Isoform 1 of La-related protein 1 | −6.159 |
| IPI:IPI00224969.2 | VAPS*MSSLNS*LAS*S*CFD | 1173 | Fam62c | Isoform 1 of Extended synaptotagmin-3 | −6.023 |
| | LTDVSLNTEAGDSR | | | | |
| IPI:IPI00929786.1 | S*LPTTVPES*PNYR | 1174 | Larp1 | Isoform 1 of La-related protein 1 | −5.98 |
| IPI:IPI00458039.3 | IFTEANLVS*VGS*KK | 1175 | Mdn1 | Midasin homolog | −5.907 |
| IPI:IPI00318938.6 | NS*PVAKT*PPKDLPAIPGVT | 1176 | Eif4ebp1 | Eukaryotic translation initiation | −5.874 |
| | SPTSDEPPMQASQSQLPS* | | | factor 4E-binding protein 1 | |
| | SPEDK | | | | |
| IPI:IPI00130920.1 | TLEVVSPSQSVTGS*AGHTP | 1177 | Mtap1b | Microtubule-associated protein 1B | −5.86 |
| | YYQS*PTDEK | | | | |
| IPI:IPI00318938.6 | VALGDGVQLPPGDYSTT*P | 1178 | Eif4ebp1 | Eukaryotic translation initiation | −5.685 |
| | GGTLFSTT*PGGTR | | | factor 4E-binding protein 1 | |
| IPI:IPI00270767.3 | VVK@EDGVMS*PEK@ | 1179 | Rtn4 | Isoform 2 of Reticulon-4 | −5.681 |
| IPI:IPI00121430.2 | DLKPETDYVVNVY*S*VVED | 1180 | Col12a1 | Isoform 1 of Collagen alpha-1(XII) | −5.655 |
| | EYSEPLKGT*EK | | | chain | |
| IPI:IPI00169506.7 | QAVY*Y*LTLQAT*DGGNQS | 1181 | Pcdh24 | Pcdh24 protein | −5.499 |
| | TT*TALEITLLDINDNPPVVR | | | | |
| IPI:IPI00133685.1 | LNT*SDFQK | 1182 | Akt1s1 | Proline-rich AKT1 substrate 1 | −5.419 |
| IPI:IPI00876080.1 | LPDLRS*R | 1183 | Gpr157 | Putative uncharacterized protein | −5.334 |
| | | | | (Fragment) | |
| IPI:IPI00850983.1 | TPGPPS*SQGSPVDTQPAA | 1184 | Synj1 | similar to mKIAA0910 protein | −5.321 |
| | QK | | | | |
| IPI:IPI00318938.6 | NS*PVAKT*PPKDLPAIPGVT | 1185 | Eif4ebp1 | Eukaryotic translation initiation | −4.991 |
| | SPTSDEPPMQASQSQLPSS | | | factor 4E-binding protein 1 | |
| | *PEDK | | | | |
| IPI:IPI00282808.7 | T*PGVPKQKPCSPLS*EPDA | 1186 | Zfp318 | zinc finger protein 318 isoform 1 | −4.923 |
| | FLK | | | | |
| IPI:IPI00133374.5 | EVDPSTGELQSLQMPESEG | 1187 | Sqstm1 | Isoform 1 of Sequestosome-1 | −4.888 |
| | PS*SLDPSQEGPTGLK@ | | | | |
| IPI:IPI00133374.5 | EVDPSTGELQSLQMPESEG | 1188 | Sqstm1 | Isoform 1 of Sequestosome-1 | −4.882 |
| | PS*SLDPSQEGPTGLK@ | | | | |
| IPI:IPI00133685.1 | LNT*SDFQK | 1189 | Akt1s1 | Proline-rich AKT1 substrate 1 | −4.871 |
| IPI:IPI00623114.5 | DMPAAGS*LGSSS*R | 1190 | Fat1 | FAT tumor suppressor homolog 1 | −4.85 |
| IPI:IPI00318938.6 | VALGDGVQLPPGDYSTT*P | 1191 | Eif4ebp1 | Eukaryotic translation initiation | −4.78 |
| | GGT*LFSTTPGGTR | | | factor 4E-binding protein 1 | |
| IPI:IPI00125442.4 | VPMVSS*QPTS*SM#VPPPI | 1192 | Alpk3 | myocyte induction differentiation | −4.621 |
| | KPLNR | | | originator | |
| IPI:IPI00380641.3 | KLPVVSS*VVK | 1193 | Zc3h14 | Isoform 2 of Zinc finger CCCH domain- | −4.368 |
| | | | | containing protein 14 | |
| IPI:IPI00338745.4 | QADVADQQTTELPAENGET | 1194 | Hmgn1; | Non-histone chromosomal protein | −4.324 |
| | ENQSPAS*EEEKEAK | | LOC100044391 | HMG-14 | |
| IPI:IPI00338745.4 | QADVADQQTTELPAENGET | 1195 | Hmgn1; | Non-histone chromosomal protein | −4.324 |
| | ENQS*PASEEEKEAK | | LOC100044391 | HMG-14 | |
| IPI:IPI00271998.4 | GPNS*PPPGMPLR | 1196 | 2310057M21Rik | Uncharacterized protein C10orf88 | −4.316 |
| | | | | homolog | |
| IPI:IPI00338976.3 | FTISAIS*K | 1197 | Fcrls | Fc receptor-like protein 2 scavenger | −4.254 |
| | | | | isoform | |
| IPI:IPI00352984.4 | IVHFS*VNACLT*PICSLHHV | 1198 | Xdh | Xanthine dehydrogenase/oxidase | −4.21 |
| | AVTT*VEGIGNTKK | | | | |
| IPI:IPI00318938.6 | VALGDGVQLPPGDYS*TTP | 1199 | Eif4ebp1 | Eukaryotic translation initiation | −4.196 |
| | GGTLFSTT*PGGTR | | | factor 4E-binding protein 1 | |
| IPI:IPI00330246.2 | K@GSFS*GR\hat{ }LS*PAYSLGS | 1200 | Phldb1 | Isoform 2 of Pleckstrin homology-like | −4.16 |
| | LTGASPR\hat{ } | | | domain family B member 1 | |
| IPI:IPI00330066.5 | T*RSPDVISSASTALSQDIPE | 1201 | Edc4 | Isoform 1 of Enhancer of mRNA- | −4.045 |
| | IASEALSR | | | decapping protein 4 | |
| IPI:IPI00225062.2 | RKETPS*PR | 1202 | Srrm2 | Isoform 3 of Serine/arginine repetitive | −4.005 |
| | | | | matrix protein 2 | |
| IPI:IPI00405665.6 | K@IIETM#SS*PK@ | 1203 | Kif20b | Isoform 1 of M-phase phosphoprotein 1 | −3.928 |
| IPI:IPI00311187.4 | S*AASGS*SGES*MDSVSVS | 1204 | Rgl1 | Ral guanine nucleotide dissociation | −3.911 |
| | *S*CESNHS*EAEEGPVTPM | | | stimulator-like 1 | |
| | DTPDEPQKK | | | | |
| IPI:IPI00153724.1 | VHS*PPASLVPR\hat{ } | 1205 | 1110007A13Rik | UPF0557 protein C10orf119 homolog | −3.905 |
| IPI:IPI00121277.1 | VAAAAGSGPS*PPCS*PGH | 1206 | Pi4k2a | Phosphatidylinositol 4-kinase type 2- | −3.904 |
| | DR | | | alpha | |
| IPI:IPI00331556.5 | MQVDQEEPHTEEQQQQPQ | 1207 | Hspa4 | Heat shock 70 kDa protein 4 | −3.897 |
| | TPAENKAESEEM#ET*SQA | | | | |
| | GSK | | | | |
| IPI:IPI00135443.2 | KTSFDQDS*DVDIFPSDFTS | 1208 | Top2b | DNA topoisomerase 2-beta | −3.873 |
| | EPPALPR | | | | |
| IPI:IPI00469938.3 | VGSGAEPGEGS*PGSR\hat{ }PG | 1209 | BC021381 | Isoform 2 of Uncharacterized protein | −3.843 |
| | PIQADS*PK@ | | | KIAA1931 | |
| IPI:IPI00331361.2 | SPT*KAEPATPAEAAQSDR | 1210 | Mybbp1a | Myb-binding protein 1A | −3.83 |
| IPI:IPI00625898.3 | RQS*S*ESDIESVMYT | 1211 | Bbx | Isoform 1 of HMG box transcription | −3.809 |
| | IEAVAK | | | factor BBX | |
| IPI:IPI00405227.3 | S*LGEIAALTSK | 1212 | Vcl | Vinculin | −3.804 |
| IPI:IPI00109318.1 | RNS*PMAQTPPCHLPNIPGV | 1213 | Eif4ebp2 | Eukaryotic translation initiation | −3.791 |
| | TSPGALIEDSK | | | factor 4E-binding protein 2 | |
| IPI:IPI00318938.6 | VALGDGVQLPPGDYSTT*P | 1214 | Eif4ebp1 | Eukaryotic translation initiation | −3.751 |
| | GGTLFSTT*PGGTR | | | factor 4E-binding protein 1 | |
| IPI:IPI00318938.6 | RVALGDGVQLPPGDY*STT | 1215 | Eif4ebp1 | Eukaryotic translation initiation | −3.726 |
| | PGGTLFSTT*PGGTR | | | factor 4E-binding protein 1 | |
| IPI:IPI00318938.6 | RVALGDGVQLPPGDYSTT* | 1216 | Eif4ebp1 | Eukaryotic translation initiation | −3.726 |
| | PGGTLFSTT*PGGTR | | | factor 4E-binding protein 1 | |
| IPI:IPI00318938.6 | VALGDGVQLPPGDYSTTPG | 1217 | Eif4ebp1 | Eukaryotic translation initiation | −3.705 |
| | GTLFS*TT*PGGTR | | | factor 4E-binding protein 1 | |
| IPI:IPI00929814.1 | KEANEVLS*DS*AGEDHPAE | 1218 | Morc2a | microrchidia 2A isoform 2 | −3.673 |
| | LR | | | | |
| IPI:IPI00229645.2 | S*NDDLLAGMAGGVNVTNG | 1219 | Cytsa | Cytospin-A | −3.632 |
| | IK | | | | |
| IPI:IPI00553798.2 | AGAIS*ASGPELEGAGHSK | 1220 | Ahnak | AHNAK nucleoprotein isoform 1 | −3.608 |
| IPI:IPI00756424.3 | TAR\hat{ }PNSEAPLS*GS*EDAD | 1221 | Eif5b | Isoform 1 of Eukaryotic translation | −3.543 |
| | DSNK@ | | | initiation factor 5B | |
| IPI:IPI00121760.5 | LKTEEGEIVY*SAEESENR | 1222 | Hnrpll | Isoform 1 of Heterogeneous nuclear | −3.51 |
| | | | | ribonucleoprotein L-like | |
| IPI:IPI00458958.2 | DWDKES*EGEEPAGGR | 1223 | Rrp15 | RRP15-like protein | −3.46 |
| IPI:IPI00458958.2 | DWDK@ES*EGEEPAGGR\hat{ } | 1224 | Rrp15 | RRP15-like protein | −3.46 |
| IPI:IPI00318938.6 | RVALGDGVQLPPGDYSTT* | 1225 | Eif4ebp1 | Eukaryotic translation initiation | −3.429 |
| | PGGTLFSTT*PGGTR | | | factor 4E-binding protein 1 | |
| IPI:IPI00318938.6 | RVALGDGVQLPPGDYSTTP | 1226 | Eif4ebp1 | Eukaryotic translation initiation | −3.429 |
| | GGT*LFSTT*PGGTR | | | factor 4E-binding protein 1 | |
| IPI:IPI00318938.6 | RVALGDGVQLPPGDYSTT* | 1227 | Eif4ebp1 | Eukaryotic translation initiation | −3.429 |
| | PGGTLFSTT*PGGTR | | | factor 4E-binding protein 1 | |
| IPI:IPI00109695.3 | IEILDS*PASK | 1228 | D10Wsu102e | Uncharacterized protein C12orf45 | −3.403 |
| | | | | homolog | |
| IPI:IPI00230719.8 | RDS*SDDWEIPDGQITVGQR | 1229 | Braf | Isoform 1 of B-Raf proto-oncogene | −3.372 |
| | | | | serine/threonine-protein kinase | |
| IPI:IPI00377925.2 | SS*PVCSTAPVETEPK | 1230 | Atg2b | Isoform 1 of Autophagy-related protein | −3.353 |
| | | | | 2 homolog B | |
| IPI:IPI00221723.1 | MGQEFVES*K | 1231 | Wasf2 | Wiskott-Aldrich syndrome protein family | −3.314 |
| | | | | member 2 | |
| IPI:IPI00165794.1 | LWTHTSDQQVSAISNPSPC | 1232 | Tmem48 | Nucleoporin NDC1 | −3.255 |
| | AS*VTAEGK | | | | |
| IPI:IPI00848747.1 | DDS*TCLGGILPAGLEPGS* | 1233 | 4930568B11Rik | hypothetical protein LOC75873 | −3.253 |
| | S*T*R | | | | |
| IPI:IPI00318938.6 | VALGDGVQLPPGDYSTT*P | 1234 | Eif4ebp1 | Eukaryotic translation initiation | −3.239 |
| | GGTLFSTT*PGGTR | | | factor 4E-binding protein 1 | |
| IPI:IPI00127415.1 | CGSGPVHISGQHLVAVEED | 1235 | Npm1 | Nucleophosmin | −3.232 |
| | AES*EDEDEEDVK@ | | | | |
| IPI:IPI00318938.6 | VALGDGVQLPPGDYST*TP | 1236 | Eif4ebp1 | Eukaryotic translation initiation | −3.209 |
| | GGTLFST*TPGGTR | | | factor 4E-binding protein 1 | |
| IPI:IPI00318938.6 | VALGDGVQLPPGDYS*TTP | 1237 | Eif4ebp1 | Eukaryotic translation initiation | −3.209 |
| | GGTLFSTT*PGGTR | | | factor 4E-binding protein 1 | |
| IPI:IPI00318938.6 | VALGDGVQLPPGDYSTT*P | 1238 | Eif4ebp1 | Eukaryotic translation initiation | −3.175 |
| | GGTLFSTT*PGGTR | | | factor 4E-binding protein 1 | |
| IPI:IPI00318938.6 | VALGDGVQLPPGDYSTT*P | 1239 | Eif4ebp1 | Eukaryotic translation initiation | −3.175 |
| | GGTLFS*TTPGGTR | | | factor 4E-binding protein 1 | |
| IPI:IPI00120133.1 | EDGDILAS*S*FSVDTQVAYI | 1240 | Nat15 | N-acetyltransferase 15 | −3.163 |
| | LSLGVVK | | | | |
| IPI:IPI00154109.2 | SNS*APLIHGLSDSS*PVFQA | 1241 | Fam122a | Protein FAM122A | −3.124 |
| | EAPSAR | | | | |
| IPI:IPI00138199.5 | DGY*Y*GES*T*S*GR\hat{ } | 1242 | Pcsk5 | proprotein convertase subtilisin/kexin | −3.103 |
| | | | | type 5 | |
| IPI:IPI00318938.6 | RVALGDGVQLPPGDYSTT* | 1243 | Eif4ebp1 | Eukaryotic translation initiation | −3.092 |
| | PGGTLFSTT*PGGTR | | | factor 4E-binding protein 1 | |
| IPI:IPI00130920.1 | TELS*PSFINPNPLEWFAGE | 1244 | Mtap1b | Microtubule-associated protein 1B | −3.089 |
| | EPTEESEKPLTQSGGAPPP | | | | |
| | SGGK | | | | |
| IPI:IPI00131725.3 | HQIVCINNDLS*EEES*DDES | 1245 | Npm3 | Nucleoplasmin-3 | −3.087 |
| | *EEDEIK@LCGILPAK@ | | | | |
| IPI:IPI00330066.5 | T*RSPDVISSASTALSQDIPE | 1246 | Edc4 | Isoform 1 of Enhancer of mRNA- | −3.084 |
| | IASEALSR | | | decapping protein 4 | |
| IPI:IPI00756765.3 | ALVIQESESPPS*PPPS*PDR | 1247 | Ehmt2 | Euchromatic histone lysine N- | −3.071 |
| | \hat{ }R\hat{ } | | | methyltransferase 2 | |
| IPI:IPI00221889.2 | ILS*DDEDEDEEDAFK | 1248 | Ercc6l | DNA excision repair protein ERCC-6- | −3.063 |
| | | | | like | |
| IPI:IPI00130920.1 | TELS*PSFINPNPLEWFAGE | 1249 | Mtap1b | Microtubule-associated protein 1B | −3.052 |
| | EPTEESEKPLTQSGGAPPP | | | | |
| | SGGK | | | | |
| IPI:IPI00318938.6 | VALGDGVQLPPGDYSTT*P | 1250 | Eif4ebp1 | Eukaryotic translation initiation | −3.033 |
| | GGTLFSTTPGGT*R | | | factor 4E-binding protein 1 | |
| IPI:IPI00318938.6 | RVALGDGVQLPPGDYSTT* | 1251 | Eif4ebp1 | Eukaryotic translation initiation | −3.031 |
| | PGGTLFSTT*PGGTR | | | factor 4E-binding protein 1 | |
| IPI:IPI00318938.6 | RVALGDGVQLPPGDYSTT* | 1252 | Eif4ebp1 | Eukaryotic translation initiation | −3.031 |
| | PGGTLFSTT*PGGTR | | | factor 4E-binding protein 1 | |
| IPI:IPI00318938.6 | RVALGDGVQLPPGDYSTT* | 1253 | Eif4ebp1 | Eukaryotic translation initiation | −3.031 |
| | PGGTLFSTT*PGGTR | | | factor 4E-binding protein 1 | |
| IPI:IPI00137465.1 | S*DGSLDDGDGIHR | 1254 | Serinc1 | Serine incorporator 1 | −3.027 |
| IPI:IPI00130920.1 | QGFPDRES*PVSDLTSTGLY | 1255 | Mtap1b | Microtubule-associated protein 1B | −3 |
| | QDK | | | | |
| IPI:IPI00318938.6 | VALGDGVQLPPGDYSTT*P | 1256 | Eif4ebp1 | Eukaryotic translation initiation | −2.995 |
| | GGTLFSTTPGGT*R | | | factor 4E-binding protein 1 | |
| IPI:IPI00109318.1 | RNSPMAQT*PPCHLPNIPGV | 1257 | Eif4ebp2 | Eukaryotic translation initiation | −2.988 |
| | TSPGALIEDSK | | | factor 4E-binding protein 2 | |
| IPI:IPI00122757.1 | TDYYPEEMS*PPLMNPVSP | 1258 | Klf3; | Krueppel-like factor 3 | −2.986 |
| | PQALLQENHPS*VIVQPGK@ | | LOC100046855 | | |
| IPI:IPI00318938.6 | VALGDGVQLPPGDYSTT*P | 1259 | Eif4ebp1 | Eukaryotic translation initiation | −2.972 |
| | GGTLFSTT*PGGTR | | | factor 4E-binding protein 1 | |
| IPI:IPI00126006.6 | TQT*PPLGQTPQLGLK | 1260 | Eif4g2 | Isoform 1 of Eukaryotic translation | −2.956 |
| | | | | initiation factor 4 gamma 2 | |
| IPI:IPI00460668.2 | KAENAEGQTPAIGPDGEPL | 1261 | Smarca4 | Putative uncharacterized protein | −2.915 |
| | DETSQM#S*DLPVK | | | | |
| IPI:IPI00318938.6 | NS*PVAKT*PPKDLPAIPGVT | 1262 | Eif4ebp1 | Eukaryotic translation initiation | −2.908 |
| | SPTSDEPPMQASQSQLPS* | | | factor 4E-binding protein 1 | |
| | SPEDK | | | | |
| IPI:IPI00127764.2 | EGENVKPVNSGTWVAS*NS | 1263 | Pcm1 | Isoform 1 of Pericentriolar material 1 | −2.9 |
| | *ELTPSESLVTT*DDETFEK | | | protein | |
| IPI:IPI00874995.2 | AS*DDLGEPDVFATAPFR | 1264 | Aak1 | Uncharacterized protein FLJ45252 | −2.899 |
| | | | | homolog | |
| IPI:IPI00318938.6 | NS*PVAKT*PPKDLPAIPGVT | 1265 | Eif4ebp1 | Eukaryotic translation initiation | −2.888 |
| | SPTSDEPPMQASQSQLPSS | | | factor 4E-binding protein 1 | |
| | PEDK | | | | |
| IPI:IPI00318938.6 | VALGDGVQLPPGDYSTTPG | 1266 | Eif4ebp1 | Eukaryotic translation initiation | −2.884 |
| | GT*LFSTT*PGGTR | | | factor 4E-binding protein 1 | |
| IPI:IPI00128564.1 | R\hat{ }AAAASAAEAGIAT*PGTE | 1267 | Psmd4 | Isoform Rpn10A of 26S proteasome | −2.861 |
| | DSDDALLK@ | | | non-ATPase regulatory subunit 4 | |
| IPI:IPI00318938.6 | VALGDGVQLPPGDYSTTPG | 1268 | Eif4ebp1 | Eukaryotic translation initiation | −2.846 |
| | GT*LFSTT*PGGTR | | | factor 4E-binding protein 1 | |
| IPI:IPI00318938.6 | VALGDGVQLPPGDYSTT*P | 1269 | Eif4ebp1 | Eukaryotic translation initiation | −2.84 |
| | GGTLFSTT*PGGTR | | | factor 4E-binding protein 1 | |
| IPI:IPI00406741.5 | AAVGVTGNDITTPPNKEPPP | 1270 | Mtap4 | Isoform 4 of Microtubule-associated | −2.832 |
| | S*PEKK | | | protein 4 | |
| IPI:IPI00318938.6 | VALGDGVQLPPGDYSTT*P | 1271 | Eif4ebp1 | Eukaryotic translation initiation | −2.799 |
| | GGTLFSTT*PGGTR | | | factor 4E-binding protein 1 | |
| IPI:IPI00318938.6 | VALGDGVQLPPGDYSTT*P | 1272 | Eif4ebp1 | Eukaryotic translation initiation | −2.799 |
| | GGTLFST*TPGGTR | | | factor 4E-binding protein 1 | |
| IPI:IPI00318938.6 | VALGDGVQLPPGDYSTT*P | 1273 | Eif4ebp1 | Eukaryotic translation initiation | −2.794 |
| | GGTLFSTT*PGGTR | | | factor 4E-binding protein 1 | |
| IPI:IPI00318938.6 | VALGDGVQLPPGDYSTTPG | 1274 | Eif4ebp1 | Eukaryotic translation initiation | −2.776 |
| | GT*LFSTT*PGGTR | | | factor 4E-binding protein 1 | |
| IPI:IPI00109318.1 | NS*PMAQTPPCHLPNIPGVT | 1275 | Eif4ebp2 | Eukaryotic translation initiation | −2.763 |
| | SPGALIEDSK | | | factor 4E-binding protein 2 | |
| IPI:IPI00318938.6 | VALGDGVQLPPGDYSTT*P | 1276 | Eif4ebp1 | Eukaryotic translation initiation | −2.762 |
| | GGTLFSTT*PGGTR | | | factor 4E-binding protein 1 | |
| IPI:IPI00318938.6 | VALGDGVQLPPGDYSTT*P | 1277 | Eif4ebp1 | Eukaryotic translation initiation | −2.756 |
| | GGTLFSTT*PGGTR | | | factor 4E-binding protein 1 | |
| IPI:IPI00331177.2 | VSS*TPETPLTK@ | 1278 | Pola2 | DNA polymerase alpha subunit B | −2.747 |
| IPI:IPI00109318.1 | NSPMAQT*PPCHLPNIPGVT | 1279 | Eif4ebp2 | Eukaryotic translation initiation | −2.714 |
| | SPGALIEDSK | | | factor 4E-binding protein 2 | |
| IPI:IPI00318938.6 | VALGDGVQLPPGDYSTTPG | 1280 | Eif4ebp1 | Eukaryotic translation initiation | −2.672 |
| | GT*LFSTT*PGGTR | | | factor 4E-binding protein 1 | |
| IPI:IPI00318938.6 | VALGDGVQLPPGDYSTT*P | 1281 | Eif4ebp1 | Eukaryotic translation initiation | −2.672 |
| | GGTLFSTTPGGT*R | | | factor 4E-binding protein 1 | |
| IPI:IPI00318938.6 | VALGDGVQLPPGDYSTT*P | 1282 | Eif4ebp1 | Eukaryotic translation initiation | −2.672 |
| | GGTLFSTT*PGGTR | | | factor 4E-binding protein 1 | |
| IPI:IPI00322707.5 | IK@PVTENLVLPSHTGFCQ | 1283 | Atrx | Transcriptional regulator ATRX | −2.663 |
| | S*S*GDEALSK@ | | | | |
| IPI:IPI00322707.5 | IK@PVTENLVLPSHTGFCQ | 1284 | Atrx | Transcriptional regulator ATRX | −2.663 |
| | S*S*GDEALSK@ | | | | |
| IPI:IPI00918973.1 | IGFPETAEEELEEIASENS*D | 1285 | Strap | Serine-threonine kinase receptor- | −2.612 |
| | SIYSSTPEVK | | | associated protein | |
| IPI:IPI00318938.6 | VALGDGVQLPPGDYS*TTP | 1286 | Eif4ebp1 | Eukaryotic translation initiation | −2.565 |
| | GGTLFSTT*PGGTR | | | factor 4E-binding protein 1 | |
| IPI:IPI00125960.1 | TAS*GSS*VTS*LEGTR | 1287 | Ndrg1 | Protein NDRG1 | −2.557 |
| IPI:IPI00125960.1 | TAS*GSS*VTS*LEGTR | 1288 | Ndrg1 | Protein NDRG1 | −2.557 |
| IPI:IPI00125960.1 | TAS*GSSVTS*LEGTR | 1289 | Ndrg1 | Protein NDRG1 | −2.546 |
| IPI:IPI00323045.3 | S*MDVDLNQAHMEDTPK@ | 1290 | Melk | Maternal embryonic leucine zipper | −2.53 |
| | | | | kinase | |
| IPI:IPI00465761.5 | SQLVHGCSQDSDELNPGGL | 1291 | Arhgef17 | Isoform 1 of Rho guanine nucleotide | −2.526 |
| | GSAGGVGS*PEPPTS*PR\hat{ } | | | exchange factor 17 | |
| IPI:IPI00465761.5 | SQLVHGCSQDSDELNPGGL | 1292 | Arhgef17 | Isoform 1 of Rho guanine nucleotide | −2.513 |
| | GSAGGVGS*PEPPTS*PR\hat{ } | | | exchange factor 17 | |
| IPI:IPI00274140.4 | LSPFFTLDLSPT*DDK@SSK | 1293 | Grit | Isoform 2 of Rho/Cdc42/Rac GTPase- | −2.507 |
| | @PSSFTEK@ | | | activating protein RICS | |
| IPI:IPI00318938.6 | RVALGDGVQLPPGDYSTT* | 1294 | Eif4ebp1 | Eukaryotic translation initiation | −2.506 |
| | PGGTLFSTFPGGTR | | | factor 4E-binding protein 1 | |
| IPI:IPI00314240.5 | K@QPPVS*PGTALVGSQK@ | 1295 | Hmga1 | Isoform HMG-I of High mobility group | −2.493 |
| | | | | protein HMG-I/HMG-Y | |
| IPI:IPI00318938.6 | VALGDGVQLPPGDYSTT*P | 1296 | Eif4ebp1 | Eukaryotic translation initiation | −2.484 |
| | GGTLFSTT*PGGTR | | | factor 4E-binding protein 1 | |
| IPI:IPI00135379.3 | VSPMLPSSSLES*PKDK | 1297 | Myo9b | Isoform 1 of Myosin-IXb | −2.452 |
| IPI:IPI00753701.3 | SQSGS*PAAPVEQVVIHTDT | 1298 | Mdc1 | mediator of DNA damage checkpoint 1 | −2.44 |
| | SGDPTLPQR\hat{ } | | | | |
| IPI:IPI00221889.2 | R\hat{ }ILS*DDEDEDEEDAFK@ | 1299 | Ercc6l | DNA excision repair protein ERCC-6- | −2.438 |
| | | | | like | |
| IPI:IPI00318938.6 | RVALGDGVQLPPGDYSTT* | 1300 | Eif4ebp1 | Eukaryotic translation initiation | −2.437 |
| | PGGTLFSTT*PGGTR | | | factor 4E-binding protein 1 | |
| IPI:IPI00318938.6 | RVALGDGVQLPPGDYS*TT | 1301 | Eif4ebp1 | Eukaryotic translation initiation | −2.437 |
| | PGGTLFSTT*PGGTR | | | factor 4E-binding protein 1 | |
| IPI:IPI00454138.4 | K@QQHVISTEEGDM#M#ET | 1302 | Sap130 | Isoform 1 of Histone deacetylase | −2.434 |
| | *NST*DDEK@ | | | complex subunit SAP130 | |
| IPI:IPI00454138.4 | K@QQHVISTEEGDM#M#ET | 1303 | Sap130 | Isoform 1 of Histone deacetylase | −2.434 |
| | *NS*TDDEK@ | | | complex subunit SAP130 | |
| IPI:IPI00753701.3 | SQSGS*PAAPVEQVVIHTDT | 1304 | Mdc1 | mediator of DNA damage checkpoint 1 | −2.433 |
| | SGDPTLPQR\hat{ } | | | | |
| IPI:IPI00654388.2 | AENQR\hat{ }PAEDSALS*PGPLA | 1305 | Lrrfip1 | Isoform 1 of Leucine-rich repeat | −2.425 |
| | GAK@ | | | flightless-interacting protein 1 | |
| IPI:IPI00654388.2 | AENQRPAEDSALS*PGPLA | 1306 | Lrrfip1 | Isoform 1 of Leucine-rich repeat | −2.425 |
| | GAK | | | flightless-interacting protein 1 | |
| IPI:IPI00330121.4 | GLPYADHNYGAPPPPT*PP | 1307 | Setd5 | Isoform 2 of SET domain-containing | −2.414 |
| | AS*PPVQTIIPR\hat{ } | | | protein 5 | |
| IPI:IPI00323256.3 | HGS*SSYPPVIYSPLMPK | 1308 | Zfpm2 | Isoform 1 of Zinc finger protein ZFPM2 | −2.405 |
| IPI:IPI00323256.3 | HGSSS*YPPVIYSPLMPK | 1309 | Zfpm2 | Isoform 1 of Zinc finger protein ZFPM2 | −2.405 |
| IPI:IPI00323256.3 | HGSS*SYPPVIYSPLMPK@ | 1310 | Zfpm2 | Isoform 1 of Zinc finger protein ZFPM2 | −2.395 |
| IPI:IPI00123474.2 | AGADIHAENEEPLCPLPSPS | 1311 | Nfkb2 | NF-kB2 splice variant 4 | −2.389 |
| | TSGSDS*DSEGPER\hat{ } | | | | |
| IPI:IPI00117689.1 | EGDELGEGERPEDDTAAIE | 1312 | Ptrf | Polymerase I and transcript release | −2.385 |
| | LS*S*DEAVEVEEVIEESR | | | factor | |
| IPI:IPI00117689.1 | EGDELGEGERPEDDTAAIE | 1313 | Ptrf | Polymerase I and transcript release | −2.385 |
| | LS*S*DEAVEVEEVIEESR | | | factor | |
| IPI:IPI00127764.2 | RSS*LVDEAPEDEEFEQK | 1314 | Pcm1 | Isoform 1 of Pericentriolar material 1 | −2.38 |
| | | | | protein | |
| IPI:IPI00330121.4 | GLPYADHNYGAPPPPT*PP | 1315 | Setd5 | Isoform 2 of SET domain-containing | −2.359 |
| | AS*PPVQTIIPR | | | protein 5 | |
| IPI:IPI00121277.1 | VAAAAGSGPS*PPCS*PGH | 1316 | Pi4k2a | Phosphatidylinositol 4-kinase type 2- | −2.354 |
| | DR | | | alpha | |
| IPI:IPI00331361.2 | SPT*KAEPATPAEAAQSDR | 1317 | Mybbp1a | Myb-binding protein 1A | −2.35 |
| IPI:IPI00318938.6 | RVALGDGVQLPPGDYSTT* | 1318 | Eif4ebp1 | Eukaryotic translation initiation | −2.341 |
| | PGGTLFSTT*PGGTR | | | factor 4E-binding protein 1 | |
| IPI:IPI00330121.4 | GLPYADHNYGAPPPPT*PP | 1319 | Setd5 | Isoform 2 of SET domain-containing | −2.334 |
| | AS*PPVQTIIPIR\hat{ } | | | protein 5 | |
| IPI:IPI00623284.4 | IWDPTPS*HTPAGAAT*PGR | 1320 | Sf3b1 | Splicing factor 3B subunit 1 | −2.329 |
| | GDT*PGHAT*PGHGGATSS | | | | |
| | AR | | | | |
| IPI:IPI00153715.5 | TEDEEFLIQHLLQAPS*PPR | 1321 | Prr12 | proline rich 12 | −2.321 |
| IPI:IPI00116268.3 | SGS*CSS*PQPKPNY*PPLS* | 1322 | N4bp1 | N4bp1 protein | −2.307 |
| | PPLPLPQLLPSVT*EAR | | | | |
| IPI:IPI00322707.5 | AK@QPVIGDQNS*DSDEM# | 1323 | Atrx | Transcriptional regulator ATRX | −2.262 |
| | LAVLK@ | | | | |
| IPI:IPI00322707.5 | AKQPVIGDQNS*DSDEM#LA | 1324 | Atrx | Transcriptional regulator ATRX | −2.262 |
| | VLK | | | | |
| IPI:IPI00461244.3 | DTTS*FEDISPQGISDDSST | 1325 | Ccdc88a | Isoform 2 of Girdin | −2.242 |
| | GSR | | | | |
| IPI:IPI00317794.5 | KEDS*DEDEDEEDEDDS*D | 1326 | Ncl | Nucleolin | −2.198 |
| | EDEDDEEEDEFEPPIVK | | | | |
| IPI:IPI00317794.5 | K@EDS*DEDEDEEDEDDS* | 1327 | Ncl | Nucleolin | −2.198 |
| | DEDEDDEEEDEFEPPIVK@ | | | | |
| IPI:IPI00400381.9 | AHS*LLFENSDSFSEDTGTL | 1328 | Phactr4 | Isoform 1 of Phosphatase and actin | −2.193 |
| | GR\hat{ } | | | regulator 4 | |
| IPI:IPI00320208.3 | YGPSSVEDTTGSGAADAKD | 1329 | Eef1b2 | Elongation factor 1-beta | −2.192 |
| | DDDIDLFGS*DDEEESEEAK | | | | |
| IPI:IPI00923656.1 | R\hat{ }DS*SSLSSPLNPK@ | 1330 | Baz1b | Isoform 1 of Tyrosine-protein kinase | −2.17 |
| | | | | BAZ1B | |
| IPI:IPI00318938.6 | VALGDGVQLPPGDYSTTPG | 1331 | Eif4ebp1 | Eukaryotic translation initiation | −2.17 |
| | GT*LFST*TPGGTR | | | factor 4E-binding protein 1 | |
| IPI:IPI00108389.5 | ETVVSGPLGVEDISPSMS*P | 1332 | Trp53bp1 | Transformation related protein 53 | −2.161 |
| | DDK@ | | | binding protein 1 | |
| IPI:IPI00415558.1 | AASPAKPS*SLDLVPNLPR | 1333 | Synpo | Isoform 3 of Synaptopodin | −2.151 |
| IPI:IPI00404545.2 | SCSVT*DTVAEQAHLPPPSV | 1334 | Nedd4I | Isoform 3 of E3 ubiquitin-protein | −2.113 |
| | AYVHTTPGLPSGWEER | | | ligase NEDD4-like | |
| IPI:IPI00416203.1 | AVPFVPM#SYQLS*QS*Y*Y | 1335 | Gtf3c1 | Isoform 2 of General transcription | −2.105 |
| | S*LGK | | | factor 3C polypeptide 1 | |
| IPI:IPI00355042.3 | IPMPPSS*PQPR | 1336 | Ppp1r13l | RelA-associated inhibitor | −2.104 |
| IPI:IPI00320208.3 | YGPSSVEDTTGSGAADAKDK | 1337 | Eef1b2 | Elongation factor 1-beta | −2.096 |
| | DDDIDLFGS*DDEEESEEAKK | | | | |
| IPI:IPI00623382.2 | LMKPPS*PEHQS*PDTQQE | 1338 | Morc2a | MORC family CW-type zinc finger | −2.069 |
| | GGEEEEAMVAR | | | protein 2A | |
| IPI:IPI00125960.1 | TAS*GSS*VTSLEGTR | 1339 | Ndrg1 | Protein NDRG1 | −2.055 |
| IPI:IPI00125960.1 | TAS*GSS*VTSLEGTR | 1340 | Ndrg1 | Protein NDRG1 | −2.055 |
| IPI:IPI00125960.1 | TAS*GSS*VTSLEGTR\hat{ } | 1341 | Ndrg1 | Protein NDRG1 | −2.055 |
| IPI:IPI00330121.4 | GLPYADHNYGAPPPPT*PP | 1342 | Setd5 | Isoform 2 of SET domain-containing | −2.045 |
| | AS*PPVQTIIPR\hat{ } | | | protein 5 | |
| IPI:IPI00318938.6 | RVALGDGVQLPPGDYSTT* | 1343 | Eif4ebp1 | Eukaryotic translation initiation | −2.035 |
| | PGGTLFSTT*PGGTR | | | factor 4E-binding protein 1 | |
| IPI:IPI00226701.3 | ILGDHLLLDPAHELPPY*TPP | 1344 | Trerf1 | Isoform 4 of Transcriptional-regulating | −2.03 |
| | PMLS*PVR | | | factor 1 | |
| IPI:IPI00348488.5 | SCS*M#ELHGEGNQEPGSP | 1345 | Dennd4c | DENN/MADD domain containing 4C | −2.012 |
| | AVFAHPLER\hat{ } | | | | |
| IPI:IPI00318938.6 | RVALGDGVQLPPGDYSTT* | 1346 | Eif4ebp1 | Eukaryotic translation initiation | −2.01 |
| | PGGTLFSTT*PGGTR | | | factor 4E-binding protein 1 | |
| IPI:IPI00317794.5 | K@EDS*DEDEDEEDEDDS* | 1347 | Ncl | Nucleolin | −1.999 |
| | DEDEDDEEEDEFEPPIVK@ | | | | |
| IPI:IPI00124717.1 | K@PEFS*PTLK@ | 1348 | Orc6l | Origin recognition complex subunit 6 | −1.969 |
| IPI:IPI00380722.1 | SET*PPVPPPPPYLANYPGF | 1349 | Bat2 | Large proline-rich protein BAT2 | −1.961 |
| | PENGTPGPPISR | | | | |
| IPI:IPI00553798.2 | SNSFS*DEREFSAPSTPTGT | 1350 | Ahnak | AHNAK nucleoprotein isoform 1 | −1.95 |
| | LEFAGGDAK | | | | |
| IPI:IPI00108389.5 | LVS*PETEASEESLQFSLEK | 1351 | Trp53bp1 | Transformation related protein 53 | −1.94 |
| | @PTTAER\hat{ } | | | binding protein 1 | |
| IPI:IPI00124272.1 | LTTTGQVTS*PVK@ | 1352 | Lig3 | Isoform Alpha of DNA ligase 3 | −1.932 |
| IPI:IPI00406741.5 | AAVGVTGNDITTPPNKEPPP | 1353 | Mtap4 | Isoform 4 of Microtubule-associated | −1.932 |
| | S*PEKK | | | protein 4 | |
| IPI:IPI00321774.2 | HLLTDLPLPPELPGGDPSPP | 1354 | Crkrs | Isoform 2 of Cell division cycle 2- | −1.921 |
| | DS*PEPK@ | | | related protein kinase 7 | |
| IPI:IPI00321774.2 | HLLTDLPLPPELPGGDPSPP | 1355 | Crkrs | Isoform 2 of Cell division cycle 2- | −1.921 |
| | DS*PEPK@ | | | related protein kinase 7 | |
| IPI:IPI00124914.1 | S*LHKPMY*FFLINL | 1356 | Olfr521 | Olfactory receptor Olfr521 | −1.913 |
| | S*ALDILFTT*TTVPK | | | | |
| IPI:IPI00123881.1 | VETPDVNLDQEEEIQM#ET | 1357 | Mcm6 | DNA replication licensing factor MCM6 | −1.909 |
| | DEGQGGVNGHADS*PAPV | | | | |
| | NR\hat{ } | | | | |
| IPI:IPI00123881.1 | VETPDVNLDQEEEIQM#ET | 1358 | Mcm6 | DNA replication licensing factor MCM6 | −1.909 |
| | DEGQGGVNGHADS*PAPV | | | | |
| | NR | | | | |
| IPI:IPI00117932.2 | S*PPVQPHTPVTISLGTAPS | 1359 | Sin3a | Isoform 1 of Paired amphipathic helix | −1.896 |
| | LQNNQPVEFNHAINYVNK | | | protein Sin3a | |
| IPI:IPI00229571.1 | ISS*K@S*PGHM#VILNQTK@ | 1360 | Sltm | Isoform 1 of SAFB-like transcription | −1.88 |
| | | | | modulator | |
| IPI:IPI00124753.3 | SLLLADSNGYTNLPDVVQP | 1361 | Mink1 | misshapen-like kinase 1 isoform 2 | −1.868 |
| | SHSPTENS*K | | | | |
| IPI:IPI00117088.2 | LS*VVGPPNR\hat{ } | 1362 | Map3k2 | Mitogen-activated protein kinase kinase | −1.86 |
| | | | | kinase 2 | |
| IPI:IPI00127602.1 | VVVADDDSEAPER\hat{ }PVNGA | 1363 | Slc30a4 | Zinc transporter 4 | −1.822 |
| | HPALQADDDS*LLDQDLPLT | | | | |
| | NSQLSLK@ | | | | |
| IPI:IPI00127602.1 | VVVADDDSEAPER\hat{ }PVNGA | 1364 | Slc30a4 | Zinc transporter 4 | −1.822 |
| | HPALQADDDS*LLDQDLPLT | | | | |
| | NSQLSLK@ | | | | |
| IPI:IPI00228942.4 | DLS*PGAPPAVAAAAPEER\hat{ } | 1365 | Hectd2 | Hectd2 protein | −1.792 |
| IPI:IPI00225062.2 | EMPGSNIES*S*PEVEERPA | 1366 | Srrm2 | Isoform 3 of Serine/arginine repetitive | −1.785 |
| | VLSALDQSQSQPSK | | | matrix protein 2 | |
| IPI:IPI00127602.1 | VVVADDDSEAPERPVNGAH | 1367 | Slc30a4 | Zinc transporter 4 | −1.782 |
| | PALQADDDS*LLDQDLPLTN | | | | |
| | SQLSLK | | | | |
| IPI:IPI00127602.1 | VVVADDDSEAPERPVNGAH | 1368 | Slc30a4 | Zinc transporter 4 | −1.782 |
| | PALQADDDS*LLDQDLPLTN | | | | |
| | SQLSLK | | | | |
| IPI:IPI00551082.3 | EK@PPFLPEEPSS*S*SEED | 1369 | Rbbp6 | Isoform 2 of Retinoblastoma-binding | −1.768 |
| | DPIPDELLCLICK@ | | | protein 6 | |
| IPI:IPI00318938.6 | RVALGDGVQLPPGDYSTT* | 1370 | Eif4ebp1 | Eukaryotic translation initiation | −1.759 |
| | PGGTLFSTT*PGGTR | | | factor 4E-binding protein 1 | |
| IPI:IPI00318938.6 | RVALGDGVQLPPGDYSTT* | 1371 | Eif4ebp1 | Eukaryotic translation initiation | −1.759 |
| | PGGTLFSTT*PGGTR | | | factor 4E-binding protein 1 | |
| IPI:IPI00135660.5 | FQHPNTDMLQEK@PSSPS | 1372 | Sdpr | Serum deprivation-response protein | −1.749 |
| | PMPSST*PSPSLNLGSTEEA | | | | |
| | IR\hat{ } | | | | |
| IPI:IPI00131725.3 | HQIVCINNDLS*EEES*DDES | 1373 | Npm3 | Nucleoplasmin-3 | −1.749 |
| | *EEDEIKLCGILPAK | | | | |
| IPI:IPI00320208.3 | YGPSSVEDTTGSGAADAKD | 1374 | Eef1b2 | Elongation factor 1-beta | −1.741 |
| | DDDIDLFGS*DDEEESEEAKK | | | | |
| IPI:IPI00321774.2 | HLLTDLPLPPELPGGDPS*P | 1375 | Crkrs | Isoform 2 of Cell division cycle 2- | −1.734 |
| | PDSPEPK@ | | | related protein kinase 7 | |
| IPI:IPI00420601.5 | T*CDSPQNPVDFISGPVPDS | 1376 | Usp10 | Ubiquitin carboxyl-terminal hydrolase | −1.734 |
| | PFPR\hat{ } | | | 10 | |
| IPI:IPI00127415.1 | CGSGPVHISGQHLVAVEED | 1377 | Npm1 | Nucleophosmin | −1.718 |
| | AES*EDEDEEDVK@ | | | | |
| IPI:IPI00464324.2 | AS*CEENLPVFIASELAK@ | 1378 | D830031N03Rik | similar to mKIAA0754 protein | −1.718 |
| IPI:IPI00318048.5 | SSPKEEVAS*EPEEAAS*PT | 1379 | Nop56 | Nucleolar protein 56 | −1.708 |
| | T*PK | | | | |
| IPI:IPI00115257.1 | QVDTEEAGMVTAAT*ASNV | 1380 | Psip1 | Isoform 1 of PC4 and SFRS1- | −1.694 |
| | KASPK | | | interacting protein | |
| IPI:IPI00317794.5 | KEDS*DEDEDEEDEDDS*D | 1381 | Ncl | Nucleolin | −1.692 |
| | EDEDDEEEDEFEPPIVK | | | | |
| IPI:IPI00125745.1 | HAELSGS*PLK@ | 1382 | Mta3 | Isoform 1 of Metastasis associated | −1.69 |
| | | | | protein MTA3 | |
| IPI:IPI00461272.6 | RGS*PGGVEMNVELPQQE | 1383 | 2310047M10Rik | Putative uncharacterized protein | −1.686 |
| | GDDDDDEDEEAAAGR | | | | |
| IPI:IPI00453999.2 | K@PS*VPDTASPADDSFVD | 1384 | Nck1 | non-catalytic region of tyrosine kinase | −1.682 |
| | PGER\hat{ } | | | adaptor protein 1 | |
| IPI:IPI00119442.1 | M#DTGEVSDIGSQGAPIVLS | 1385 | Exosc9 | Exosome complex exonuclease RRP45 | −1.674 |
| | *DS*EEEEMIILEPEK@NPK@ | | | | |
| IPI:IPI00654388.2 | AENQRPAEDSALS*PGPLA | 1386 | Lrrfip1 | Isoform 1 of Leucine-rich repeat | −1.673 |
| | GAK | | | flightless-interacting protein 1 | |
| IPI:IPI00128975.3 | DK@DDQEWEST*SPPK@P | 1387 | Dap | Death-associated protein 1 | −1.669 |
| | TVFISGVIAR\hat{ } | | | | |
| IPI:IPI00153375.1 | SACFSPVSLS*PR\hat{ }PCSPFS | 1388 | Pdlim2 | PDZ and LIM domain protein 2 | −1.659 |
| | T*PPPTS*PVALSK@ | | | | |
| IPI:IPI00515576.5 | LDGELAITKPNVSS*PSK | 1389 | Ehbp1 | Isoform 2 of EH domain-binding | −1.659 |
| | | | | protein 1 | |
| IPI:IPI00169521.4 | ALAEEDS*EDELPS*DVDFN | 1390 | Esf1 | ESF1 homolog | −1.656 |
| | DPYFAEEVKK | | | | |
| IPI:IPI00405756.8 | SISGTS*TSEK@PNSMDTA | 1391 | Rasal2 | RAS protein activator like 2 | −1.654 |
| | NTSPFK@ | | | | |
| IPI:IPI00108508.5 | ET*PPTPT*S*SPAEFSPK | 1392 | 4921517D21Rik | RIKEN cDNA 4921517D21 gene | −1.652 |
| IPI:IPI00652649.1 | IRPPPELETS*LTERPSS*PS | 1393 | Als2cr4 | Amyotrophic lateral sclerosis 2 | −1.649 |
| | LLR | | | chromosomal region candidate gene 4 | |
| | | | | protein homolog | |
| IPI:IPI00127415.1 | LKCGSGPVHISGQHLVAVE | 1394 | Npm1 | Nucleophosmin | −1.638 |
| | EDAES*EDEDEEDVK | | | | |
| IPI:IPI00453603.1 | TPVS*PVKFS*PGDFWGR | 1395 | Rps6kb1 | Isoform Alpha I of Ribosomal protein | −1.635 |
| | | | | S6 kinase beta-1 | |
| IPI:IPI00313307.3 | LSSS*DSIGPDVTDILSDIAE | 1396 | Med1 | Isoform 4 of Mediator of RNA | −1.624 |
| | EASK@LPSTSDDCPPIGT*P | | | polymerase II transcription subunit 1 | |
| | VR\hat{ } | | | | |
| IPI:IPI00379682.1 | ANTLSHFPVECPAPPEPAQ | 1397 | Tbc1d1 | Isoform 1 of TBC1 domain family | −1.623 |
| | SS*PGVSQR\hat{ } | | | member 1 | |
| IPI:IPI00379682.1 | ANTLSHFPVECPAPPEPAQ | 1398 | Tbc1d1 | Isoform 1 of TBC1 domain family | −1.623 |
| | S*SPGVSQR\hat{ } | | | member 1 | |
| IPI:IPI00318938.6 | VALGDGVQLPPGDYSTT*P | 1399 | Eif4ebp1 | Eukaryotic translation initiation | −1.621 |
| | GGTLFSTT*PGGTR | | | factor 4E-binding protein 1 | |
| IPI:IPI00351206.5 | LLK@PGEEPSEY*T*DEEDT | 1400 | Pgrmc2 | Membrane-associated progesterone | −1.62 |
| | K@ | | | receptor component 2 | |
| IPI:IPI00225062.2 | NSGPVSEVNTGFS*PEVK@ | 1401 | Srrm2 | Isoform 3 of Serine/arginine repetitive | −1.616 |
| | | | | matrix protein 2 | |
| IPI:IPI00112339.9 | R\hat{ }LS*ENNCSLDDWEIGAGH | 1402 | Lima1 | LIM domain and actin binding 1 | −1.615 |
| | LSSSAFNSEK@ | | | isoform a | |
| IPI:IPI00112339.9 | R\hat{ }LS*ENNCSLDDWEIGAGH | 1403 | Lima1 | LIM domain and actin binding 1 | −1.615 |
| | LSSSAFNSEK@ | | | isoform a | |
| IPI:IPI00515576.5 | LDGELAITKPNVSS*PSK | 1404 | Ehbp1 | Isoform 2 of EH domain-binding | −1.612 |
| | | | | protein 1 | |
| IPI:IPI00229472.5 | VEEQVEDS*DDEEDDDS*H | 1405 | Rbm28 | RNA-binding protein 28 | −1.609 |
| | DDEEER | | | | |
| IPI:IPI00229472.5 | VEEQVEDS*DDEEDDDS*H | 1406 | Rbm28 | RNA-binding protein 28 | −1.609 |
| | DDEEER\hat{ } | | | | |
| IPI:IPI00318938.6 | NS*PVAKT*PPKDLPAIPGVT | 1407 | Eif4ebp1 | Eukaryotic translation initiation | −1.6 |
| | SPTSDEPPM#QASQSQLPS | | | factor 4E-binding protein 1 | |
| | SPEDK | | | | |
| IPI:IPI00127415.1 | LKCGSGPVHISGQHLVAVE | 1408 | Npm1 | Nucleophosmin | −1.599 |
| | EDAES*EDEDEEDVK | | | | |
| IPI:IPI00453837.2 | KLPPPPPQAPPEEENES*EP | 1409 | Kdm1 | Lysine-specific histone demethylase 1 | −1.587 |
| | EEPSGVEGAAFQSR | | | | |
| IPI:IPI00319933.4 | DGTAPPPQSPSSPGSGQD | 1410 | Pacsin3 | Protein kinase C and casein kinase II | −1.565 |
| | EDWS*DEESPR | | | substrate protein 3 | |
| IPI:IPI00125662.2 | S*PQVPAAQQMLNFPEK | 1411 | Smarcc1 | Isoform 1 of SWI/SNF complex subunit | −1.554 |
| | | | | SMARCC1 | |
| IPI:IPI00230435.1 | SLTM#VEDNEDDDEDGEEL | 1412 | Lmna | Isoform C2 of Lamin-A/C | −1.546 |
| | LHHHR\hat{ }VS*GSR\hat{ } | | | | |
| IPI:IPI00228748.1 | LDR\hat{ }AS*PDLWPEQLPGVAE | 1413 | Lin52; | Protein lin-52 homolog | −1.545 |
| | FAASFK@ | | Gm7020 | | |
| IPI:IPI00622364.4 | LPPPFPGMDPESEGAAGAS | 1414 | Snx1 | Sorting nexin-1 | −1.535 |
| | EPEAGDSDTEGEDIFTGAA | | | | |
| | AAT*K@PQS*PK@ | | | | |
| IPI:IPI00117689.1 | GEATDLLRGS*S*PDVHTLL | 1415 | Ptrf | Polymerase I and transcript release | −1.532 |
| | EITEESDAVLVDK | | | factor | |
| IPI:IPI00117689.1 | GEATDLLR\hat{ }GS*S*PDVHTLL | 1416 | Ptrf | Polymerase I and transcript release | −1.532 |
| | EITEESDAVLVDK@ | | | factor | |
| IPI:IPI00606555.2 | KPEPEAGQAEPLS*PRPPP | 1417 | Rreb1 | Isoform 3 of Ras-responsive element- | −1.526 |
| | CPTLSVTVEPK | | | binding protein 1 | |
| IPI:IPI00606555.2 | KPEPEAGQAEPLS*PRPPP | 1418 | Rreb1 | Isoform 3 of Ras-responsive element- | −1.526 |
| | CPTLSVTVEPK | | | binding protein 1 | |
| IPI:IPI00380394.5 | IEEPVSM#EMDNHLSDKDE | 1419 | Ints3 | Integrator complex subunit 3 | −1.525 |
| | SCYDNAEAAFS*DDEEDLN | | | | |
| | SK | | | | |
| IPI:IPI00229571.1 | IS*SK@S*PGHM#VILNQTK@ | 1420 | Sltm | Isoform 1 of SAFB-like transcription | −1.524 |
| | | | | modulator | |
| IPI:IPI00551082.3 | EKPPFLPEEPS*S*SSEEDD | 1421 | Rbbp6 | Isoform 2 of Retinoblastoma-binding | −1.522 |
| | PIPDELLCLICK | | | protein 6 | |
| IPI:IPI00468896.7 | KGELMENDQDAMEYS*S*E | 1422 | Ddx46 | Isoform 1 of Probable ATP-dependent | −1.517 |
| | EEEVDLQTALTGYQTK | | | RNA helicase DDX46 | |
| IPI:IPI00280250.5 | VGES*SEDVALEEETIYENE | 1423 | Sh3pxd2a | Isoform 1 of SH3 and PX domain- | −1.513 |
| | GFR\hat{ }PYTEDTLSAR\hat{ } | | | containing protein 2A | |
| IPI:IPI00280250.5 | VGES*SEDVALEEETIYENE | 1424 | Sh3pxd2a | Isoform 1 of SH3 and PX domain- | −1.513 |
| | GFRPYTEDTLSAR | | | containing protein 2A | |
| IPI:IPI00664670.4 | LGS*FGSITR | 1425 | Flnc | Isoform 1 of Filamin-C | −1.512 |
| IPI:IPI00117929.1 | STEESLSEDAFTESELS*PIR | 1426 | Oxr1 | Isoform 2 of Oxidation resistance | −1.51 |
| | \hat{ }EELLSSEPR\hat{ } | | | protein 1 | |
| IPI:IPI00117929.1 | STEESLSEDAFTESELS*PIR | 1427 | Oxr1 | Isoform 2 of Oxidation resistance | −1.51 |
| | \hat{ }EELLSSEPR\hat{ } | | | protein 1 | |
| IPI:IPI00664670.4 | LGS*FGSITR\hat{ } | 1428 | Flnc | Isoform 1 of Filamin-C | −1.509 |
| IPI:IPI00130920.1 | AS*LS*PMDEPVPDSESPVE | 1429 | Mtap1b | Microtubule-associated protein 1B | −1.509 |
| | K@ | | | | |
| IPI:IPI00113362.2 | NSNSYGIPEPAHAY*AQPQT | 1430 | Crkl | Crk-like protein | −1.508 |
| | TTPLPTVASTPGAAINPLPS | | | | |
| | TQNGPVFAK | | | | |
| IPI:IPI00331334.3 | VSSAPIPCPS*PSPAPSAVP | 1431 | Bag3 | BAG family molecular chaperone | −1.508 |
| | S*PPK | | | regulator 3 | |
| IPI:IPI00331209.1 | NSS*FVLPK | 1432 | Rin2 | Isoform 1 of Ras and Rab interactor 2 | −1.504 |
| IPI:IPI00225062.2 | GHTQTWPDTSSPEVMQT*Q | 1433 | Srrm2 | Isoform 3 of Serine/arginine repetitive | −1.504 |
| | VES*PLLQSK | | | matrix protein 2 | |
| IPI:IPI00664670.4 | LGS*FGSITR\hat{ } | 1434 | Flnc | Isoform 1 of Filamin-C | −1.502 |
| IPI:IPI00664670.4 | LGS*FGSITR | 1435 | Flnc | Isoform 1 of Filamin-C | −1.502 |
| IPI:IPI00664670.4 | LGS*FGSITR | 1436 | Flnc | Isoform 1 of Filamin-C | −1.502 |
| IPI:IPI00664670.4 | LGS*FGSITR | 1437 | Flnc | lsoform 1 of Filamin-C | −1.497 |
| IPI:IPI00126006.6 | TQT*PPLGQTPQLGLK@ | 1438 | Eif4g2 | Isoform 1 of Eukaryotic translation | −1.492 |
| | | | | initiation factor 4 gamma 2 | |
| IPI:IPI00113798.2 | ATWGDGGDNS*PSNVVSK | 1439 | Snap23 | Synaptosomal-associated protein | −1.49 |
| IPI:IPI00664670.4 | LGS*FGSITR\hat{ } | 1440 | Flnc | Isoform 1 of Filamin-C | −1.483 |
| IPI:IPI00169771.1 | EDGIDAVEVAADR\hat{ }PGS*PR\hat{ } | 1441 | BC031781 | UPF0667 protein C1orf55 homolog | −1.482 |
| IPI:IPI00169806.3 | GMEGLIS*PTEAVGNSCGA | 1442 | Nek9 | Serine/threonine-protein kinase Nek9 | −1.478 |
| | SSSCPGWLR\hat{ } | | | | |
| IPI:IPI00117932.2 | S*PPVQPHTPVTISLGTAPS | 1443 | Sin3a | Isoform 1 of Paired amphipathic helix | −1.477 |
| | LQNNQPVEFNHAINYVNK@ | | | protein Sin3a | |
| IPI:IPI00225062.2 | NSGPVSEVNTGFS*PEVK@ | 1444 | Srrm2 | Isoform 3 of Serine/arginine repetitive | −1.475 |
| | | | | matrix protein 2 | |
| IPI:IPI00128062.1 | RGQEELEVPVDPLPS*SPA | 1445 | Snx15 | Sorting nexin-15 | −1.472 |
| | QEALDLLFSCDSTEEASSSL | | | | |
| | AR | | | | |
| IPI:IPI00224570.3 | GVNFAEEPMRS*DS*ENGE | 1446 | Prkar2b | cAMP-dependent protein kinase type II- | −1.468 |
| | EEEAAEAGAFNAPVINR | | | beta regulatory subunit | |
| IPI:IPI00380722.1 | SET*PPVPPPPPYLANYPGF | 1447 | Bat2 | Large proline-rich protein BAT2 | −1.463 |
| | PENGTPGPPISR\hat{ } | | | | |
| IPI:IPI00330695.5 | GLLAQDLQAESSPPAS*PLL | 1448 | Fam129b | Niban-like protein 1 | −1.46 |
| | NGAPVQESSQPVAVPEAS* | | | | |
| | PPASPLR\hat{ } | | | | |
| IPI:IPI00750546.1 | GGGQSS*PQEEPTWK@ | 1449 | Cwc22 | Novel protein | −1.452 |
| IPI:IPI00129356.1 | SGS*GMSVISSSSVDQR | 1450 | Itsn1 | Isoform 1 of Intersectin-1 | −1.451 |
| IPI:IPI00753701.3 | SPT*LGEDS*DTEVDEDHKP | 1451 | Mdc1 | mediator of DNA damage checkpoint 1 | −1.447 |
| | GFADS*ETDVEEER | | | | |
| IPI:IPI00137730.7 | VLTPTQVMNR\hat{ }PSS*ISWDG | 1452 | Pebp1 | Phosphatidylethanolamine-binding | −1.431 |
| | LDPGK@ | | | protein 1 | |
| IPI:IPI00123802.5 | NIQQDNSEAGTQPQVQTDG | 1453 | Hsph1 | Isoform HSP105-alpha of Heat shock | −1.428 |
| | QQTSQSPPS*PELTSEESK | | | protein 105 kDa | |
| | @TPDADK@ | | | | |
| IPI:IPI00421179.1 | EATLPPVS*PPK@ | 1454 | Eif4g1 | Isoform 1 of Eukaryotic translation | −1.421 |
| | | | | initiation factor 4 gamma 1 | |
| IPI:IPI00421179.1 | EATLPPVS*PPK | 1455 | Eif4g1 | Isoform 1 of Eukaryotic translation | −1.421 |
| | | | | initiation factor 4 gamma 1 | |
| IPI:IPI00318006.5 | R\hat{ }IS*WPENSFDFVSK@ | 1456 | Serhl | Serine hydrolase-like protein | −1.411 |
| IPI:IPI00318006.5 | R\hat{ }IS*WPENSFDFVSK@ | 1457 | Serhl | Serine hydrolase-like protein | −1.411 |
| IPI:IPI00125501.1 | KAEEAT*PVTALR | 1458 | Epb4.1l3 | Isoform 1 of Band 4.1-like protein 3 | −1.408 |
| IPI:IPI00405665.6 | K@IIETM#SS*PK@ | 1459 | Kif20b | Isoform 1 of M-phase phosphoprotein 1 | −1.399 |
| IPI:IPI00405665.6 | KIIETM#SS*PK | 1460 | Kif20b | Isoform 1 of M-phase phosphoprotein 1 | −1.399 |
| IPI:IPI00119442.1 | M#DTGEVSDIGSQGAPIVLS | 1461 | Exosc9 | Exosome complex exonuclease RRP45 | −1.396 |
| | *DS*EEEEMIILEPEK@NPK@ | | | | |
| IPI:IPI00121760.5 | LKTEEGEIVYS*AEESENR | 1462 | Hnrpll | Isoform 1 of Heterogeneous nuclear | −1.387 |
| | | | | ribonucleoprotein L-like | |
| IPI:IPI00320208.3 | YGPSSVEDTTGSGAADAKD | 1463 | Eef1b2 | Elongation factor 1-beta | −1.381 |
| | DDDIDLFGS*DDEEESEEAK | | | | |
| IPI:IPI00664670.4 | LGS*FGSITR\hat{ } | 1464 | Flnc | Isoform 1 of Filamin-C | −1.373 |
| IPI:IPI00664670.4 | LGS*FGSITR | 1465 | Flnc | Isoform 1 of Filamin-C | −1.373 |
| IPI:IPI00125348.2 | AEEQLPPLLSPPS*PSTPHSR | 1466 | Mprip | Isoform 1 of Myosin phosphatase Rho- | −1.371 |
| | | | | interacting protein | |
| IPI:IPI00120095.2 | DFTKPQDGDIIAPLIT*PLK | 1467 | Samhd1 | SAM domain and HD domain- | −1.371 |
| | | | | containing protein 1 | |
| IPI:IPI00756765.3 | ALVIQESESPPS*PPPS* | 1468 | Ehmt2 | Euchromatic histone lysine N- | −1.368 |
| | PDRR | | | methyltransferase 2 | |
| IPI:IPI00135708.1 | RKPVLPALTINPTIAEGPS*P | 1469 | Map2k2 | Dual specificity mitogen-activated | −1.365 |
| | TSEGASEANLVDLQK | | | protein kinase kinase 2 | |
| IPI:IPI00317794.5 | KEDS*DEDEDEEDEDDS*D | 1470 | Ncl | Nucleolin | −1.364 |
| | EDEDDEEEDEFEPPIVK | | | | |
| IPI:IPI00330695.5 | GLLAQDLQAESSPPASPLL | 1471 | Fam129b | Niban-like protein 1 | −1.36 |
| | NGAPVQES*S*QPVAVPEAS | | | | |
| | *PPASPLR\hat{ } | | | | |
| IPI:IPI00330695.5 | GLLAQDLQAES*S*PPASPL | 1472 | Fam129b | Niban-like protein 1 | −1.36 |
| | LNGAPVQESSQPVAVPEAS | | | | |
| | *PPASPLR | | | | |
| IPI:IPI00453800.4 | K@PSSS*PDLWK@VS*PDQ | 1473 | Zfp828 | Zinc finger protein 828 | −1.358 |
| | R\hat{ } | | | | |
| IPI:IPI00135443.2 | AS*PITNDGEDEFVPSDGLD | 1474 | Top2b | DNA topoisomerase 2-beta | −1.357 |
| | KDEYAFSSGK | | | | |
| IPI:IPI00227267.2 | EVENEQTPVS*EPEEEKGS | 1475 | Epb4.1l2 | Putative uncharacterized protein | −1.357 |
| | QPGPPVER | | | | |
| IPI:IPI00649691.3 | LASEDAALVDDDEES*DTPA | 1476 | Cc2d1b | Coiled-coil and C2 domain-containing | −1.353 |
| | QAPLAK@ | | | protein 1B | |
| IPI:IPI00340860.5 | TAS*EGSEAETPEAPK@ | 1477 | Larp7 | Isoform 1 of La-related protein 7 | −1.347 |
| IPI:IPI00320208.3 | YGPSSVEDTTGSGAADAKD | 1478 | Eef1b2 | Elongation factor 1-beta | −1.336 |
| | DDDIDLFGS*DDEEESEEAK | | | | |
| IPI:IPI00320208.3 | YGPSSVEDTTGSGAADAKD | 1479 | Eef1b2 | Elongation factor 1-beta | −1.336 |
| | DDDIDLFGS*DDEEESEEAK | | | | |
| IPI:IPI00750546.1 | GGGQSS*PQEEPTWK | 1480 | Cwc22 | Novel protein | −1.327 |
| IPI:IPI00127415.1 | CGSGPVHISGQHLVAVEED | 1481 | Npm1 | Nucleophosmin | −1.324 |
| | AES*EDEDEEDVK | | | | |
| IPI:IPI00123871.2 | VHEPPR\hat{ }EDTVPPK@PVPP | 1482 | Ncor2 | nuclear receptor co-repressor 2 | −1.31 |
| | VPPPTQHLQPEGDVSQQS | | | | |
| | GGS*PR\hat{ } | | | | |
| IPI:IPI00458583.3 | AKS*PQPPVEEEDEHFDDT | 1483 | Hnrnpu | Putative uncharacterized protein | −1.308 |
| | VVCLDTYNCDLHFK | | | | |
| IPI:IPI00124959.1 | GPIQTLGHTDESASDKGPT | 1484 | Mki67 | Ki-67 protein | −1.306 |
| | QMPCNSLQPEQVDSFQSS* | | | | |
| | PR | | | | |
| IPI:IPI00664670.4 | LGS*FGSITR | 1485 | Flnc | Isoform 1 of Filamin-C | −1.29 |
| IPI:IPI00664670.4 | LGS*FGSITR\hat{ } | 1486 | Flnc | Isoform 1 of Filamin-C | −1.289 |
| IPI:IPI00664670.4 | LGS*FGSITR\hat{ } | 1487 | Flnc | Isoform 1 of Filamin-C | −1.289 |
| IPI:IPI00664670.4 | LGS*FGSITR | 1488 | Flnc | Isoform 1 of Filamin-C | −1.289 |
| IPI:IPI00664670.4 | LGS*FGSITR | 1489 | Flnc | Isoform 1 of Filamin-C | −1.289 |
| IPI:IPI00270767.3 | M#K@ESETFSDSS*PIEIIDE | 1490 | Rtn4 | Isoform 2 of Reticulon-4 | −1.286 |
| | FPTFVSAK@ | | | | |
| IPI:IPI00318048.5 | SSPKEEVAS*EPEEAASPT* | 1491 | Nop56 | Nucleolar protein 56 | −1.284 |
| | TPK | | | | |
| IPI:IPI00276222.1 | LSIMTSENHLNNSDKEVDEV | 1492 | Fermt2 | Fermitin family homolog 2 | −1.279 |
| | DAALS*DLEITLEGGK | | | | |
| IPI:IPI00475055.3 | RCPS*T*DPEEAVEDAEGPS | 1493 | Zfhx3 | AT motif binding factor 1 | −1.274 |
| | EASADPEELAK | | | | |
| IPI:IPI00664670.4 | LGS*FGSITR\hat{ } | 1494 | Flnc | Isoform 1 of Filamin-C | −1.273 |
| IPI:IPI00664670.4 | LGS*FGSITR | 1495 | Flnc | Isoform 1 of Filamin-C | −1.273 |
| IPI:IPI00664670.4 | LGS*FGSITR\hat{ } | 1496 | Flnc | Isoform 1 of Filamin-C | −1.273 |
| IPI:IPI00664670.4 | LGS*FGSITR | 1497 | Flnc | Isoform 1 of Filamin-C | −1.273 |
| IPI:IPI00664670.4 | LGS*FGSITR\hat{ } | 1498 | Flnc | Isoform 1 of Filamin-C | −1.273 |
| IPI:IPI00664670.4 | LGS*FGSITR | 1499 | Flnc | Isoform 1 of Filamin-C | −1.273 |
| IPI:IPI00664670.4 | LGS*FGSITR\hat{ } | 1500 | Flnc | Isoform 1 of Filamin-C | −1.272 |
| IPI:IPI00127415.1 | CGSGPVHISGQHLVAVEED | 1501 | Npm1 | Nucleophosmin | −1.271 |
| | AES*EDEDEEDVK@ | | | | |
| IPI:IPI00121277.1 | VAAAAGSGPS*PPCS*PGH | 1502 | Pi4k2a | Phosphatidylinositol 4-kinase type 2- | −1.266 |
| | DR | | | alpha | |
| IPI:IPI00121277.1 | VAAAAGSGPS*PPCS*PGH | 1503 | Pi4k2a | Phosphatidylinositol 4-kinase type 2- | −1.266 |
| | DR\hat{ } | | | alpha | |
| IPI:IPI00317794.5 | K@EDS*DEDEDEEDEDDS* | 1504 | Ncl | Nucleolin | −1.255 |
| | DEDEDDEEEDEFEPPIVK@ | | | | |
| IPI:IPI00270767.3 | VVKEDGVM#S*PEK | 1505 | Rtn4 | Isoform 2 of Reticulon-4 | −1.252 |
| IPI:IPI00318938.6 | NS*PVAKT*PPKDLPAIPGVT | 1506 | Eif4ebp1 | Eukaryotic translation initiation | −1.238 |
| | SPTSDEPPM#QASQSQLPS | | | factor 4E-binding protein 1 | |
| | SPEDK | | | | |
| IPI:IPI00114352.1 | VNHEPEPASGAS*PGATIPK | 1507 | Bin1 | Isoform 1 of Myc box-dependent- | −1.237 |
| | @S*PSQLR\hat{ } | | | interacting protein 1 | |
| IPI:IPI00114352.1 | VNHEPEPASGAS*PGATIPK | 1508 | Bin1 | Isoform 1 of Myc box-dependent- | −1.237 |
| | S*PSQLR | | | interacting protein 1 | |
| IPI:IPI00110435.2 | TPS*PEPVDK@DFYSEFGD | 1509 | Nisch | Isoform 1 of Nischarin | −1.229 |
| | K@ | | | | |
| IPI:IPI00127415.1 | CGSGPVHISGQHLVAVEED | 1510 | Npm1 | Nucleophosmin | −1.226 |
| | AES*EDEDEEDVK@ | | | | |
| IPI:IPI00127415.1 | CGSGPVHISGQHLVAVEED | 1511 | Npm1 | Nucleophosmin | −1.226 |
| | AES*EDEDEEDVK@ | | | | |
| IPI:IPI00132386.1 | ANS*TSDSMFTETPSPVLK@ | 1512 | Cdc42ep3 | Cdc42 effector protein 3 | −1.225 |
| IPI:IPI00131999.2 | FELLPTPPLSPS*RR | 1513 | Myc | myc proto-oncogene protein | −1.219 |
| IPI:IPI00282957.4 | EPAAPAS*PAPS*PVPSPT*P | 1514 | Mtap7d1 | Isoform 1 of MAP7 domain-containing | −1.217 |
| | AQPQK | | | protein 1 | |
| IPI:IPI00318938.6 | NS*PVAKT*PPKDLPAIPGVT | 1515 | Eif4ebp1 | Eukaryotic translation initiation | −1.212 |
| | SPTSDEPPMQASQSQLPSS | | | factor 4E-binding protein 1 | |
| | PEDK | | | | |
| IPI:IPI00226220.2 | TFS*LDAAPADHSLGPSR\hat{ } | 1516 | Rtkn | Isoform 1 of Rhotekin | −1.207 |
| IPI:IPI00318938.6 | NS*PVAKT*PPKDLPAIPGVT | 1517 | Eif4ebp1 | Eukaryotic translation initiation | −1.203 |
| | SPTSDEPPM#QASQSQLPS | | | factor 4E-binding protein 1 | |
| | SPEDK | | | | |
| IPI:IPI00664670.4 | LGS*FGS*ITR\hat{ } | 1518 | Flnc | Isoform 1 of Filamin-C | −1.194 |
| IPI:IPI00473912.4 | NSTHSNLHTS*LGNS*VWG | 1519 | Gigyf2 | Isoform 1 of PERQ amino acid-rich with | −1.193 |
| | SINT*GPS*NQWASELVSSI | | | GYF domain-containing protein 2 | |
| | WSNADTK | | | | |
| IPI:IPI00227380.1 | TRS*EPLPPSATASPLLAPL | 1520 | Hdac7 | Isoform 4 of Histone deacetylase 7 | −1.178 |
| | QPR | | | | |
| IPI:IPI00119442.1 | M#DTGEVSDIGSQGAPIVLS | 1521 | Exosc9 | Exosome complex exonuclease RRP45 | −1.177 |
| | *DS*EEEEMIILEPEK@NPK@ | | | | |
| IPI:IPI00119442.1 | M#DTGEVSDIGSQGAPIVLS | 1522 | Exosc9 | Exosome complex exonuclease RRP45 | −1.177 |
| | *DS*EEEEMIILEPEKNPK | | | | |
| IPI:IPI00119442.1 | MDTGEVSDIGSQGAPIVLS* | 1523 | Exosc9 | Exosome complex exonuclease RRP45 | −1.177 |
| | DS*EEEEM#IILEPEKNPK | | | | |
| IPI:IPI00221882.1 | DHNS*EDEDEDKYADDIDM | 1524 | Slu7 | Pre-mRNA-splicing factor SLU7 | −1.167 |
| | #PGQNFDSK | | | | |
| IPI:IPI00675346.2 | R\hat{ }QSGT*DLQEDVIVR\hat{ } | 1525 | Myo9a | Isoform 2 of Myosin-IXa | −1.166 |
| IPI:IPI00125319.1 | TTS*FAESCKPVQQPSAFG | 1526 | Gsk3b | Glycogen synthase kinase-3 beta | −1.165 |
| | SMK | | | | |
| IPI:IPI00654192.2 | SLS*FSEPQQPPPTVK | 1527 | Zfp395 | zinc finger protein 395 | −1.165 |
| IPI:IPI00128975.3 | DKDDQEWEST*SPPKPTVFI | 1528 | Dap | Death-associated protein 1 | −1.165 |
| | SGVIAR | | | | |
| IPI:IPI00330897.1 | S*PVVITIDS*DS* | 1529 | Topors | E3 ubiquitin-protein ligase Topors | −1.161 |
| | DGESEVK@ | | | | |
| IPI:IPI00330133.2 | INDELEGLGLEGGS*EGEAPR | 1530 | Bend3 | BEN domain-containing protein 3 | −1.159 |
| IPI:IPI00330133.2 | INDELEGLGLEGGS*EGEAPR | 1531 | Bend3 | BEN domain-containing protein 3 | −1.159 |
| IPI:IPI00127415.1 | CGSGPVHISGQHLVAVEED | 1532 | Npm1 | Nucleophosmin | −1.157 |
| | AES*EDEDEEDVK@ | | | | |
| IPI:IPI00127415.1 | CGSGPVHISGQHLVAVEED | 1533 | Npm1 | Nucleophosmin | −1.157 |
| | AES*EDEDEEDVK | | | | |
| IPI:IPI00314749.2 | ISENYS*DKSDVENADESSS | 1534 | Slc4a4 | Isoform 1 of Electrogenic sodium | −1.156 |
| | SILKPLISPAAER | | | bicarbonate cotransporter 1 | |
| IPI:IPI00123709.1 | GPSEAPQEAEAEEGATS*D | 1535 | Akap12 | Isoform 1 of A-kinase anchor protein 12 | −1.154 |
| | GEK | | | | |
| IPI:IPI00321774.2 | HLLTDLPLPPELPGGDPS*P | 1536 | Crkrs | Isoform 2 of Cell division cycle 2- | −1.15 |
| | PDS*PEPK | | | related protein kinase 7 | |
| IPI:IPI00420601.5 | SDLIEDEELEDTGKGS*EDE | 1537 | Usp10 | Ubiquitin carboxyl-terminal hydrolase | −1.149 |
| | WEQVGPK | | | 10 | |
| IPI:IPI00421179.1 | EATLPPVS*PPK@ | 1538 | Eif4g1 | Isoform 1 of Eukaryotic translation | −1.146 |
| | | | | initiation factor 4 gamma 1 | |
| IPI:IPI00269136.2 | KGLVAASGS*DS*EDEDSM | 1539 | Tgif1 | Isoform 1 of Homeobox protein TGIF1 | −1.143 |
| | DSPLDLSSSAASGK | | | | |
| IPI:IPI00221581.1 | TGS*ESSQTGASATSGR | 1540 | Eif4b | Eukaryotic translation initiation | −1.142 |
| | | | | factor 4B | |
| IPI:IPI00756765.3 | ALVIQESESPPS*PPPS*PDR | 1541 | Ehmt2 | Euchromatic histone lysine N- | −1.141 |
| | \hat{ }R\hat{ } | | | methyltransferase 2 | |
| IPI:IPI00137668.1 | M#LPHAPGVQM#QAIPEDA | 1542 | Hdac2 | Histone deacetylase 2 | −1.123 |
| | VHEDS*GDEDGEDPDKR | | | | |
| IPI:IPI00225062.2 | IHTTALTGQS*PPLASGHQG | 1543 | Srrm2 | Isoform 3 of Serine/arginine repetitive | −1.123 |
| | EGDAPSVEPGATNIQQPSS* | | | matrix protein 2 | |
| | PAPSTK@ | | | | |
| IPI:IPI00225062.2 | IHTTALTGQS*PPLASGHQG | 1544 | Srrm2 | Isoform 3 of Serine/arginine repetitive | −1.123 |
| | EGDAPSVEPGATNIQQPSS* | | | matrix protein 2 | |
| | PAPSTK | | | | |
| IPI:IPI00225062.2 | IHTTALTGQSPPLASGHQG | 1545 | Srrm2 | Isoform 3 of Serine/arginine repetitive | −1.123 |
| | EGDAPS*VEPGATNIQQPSS | | | matrix protein 2 | |
| | *PAPSTK | | | | |
| IPI:IPI00339428.9 | MSSHT*ETSSFLQTLTGR\hat{ } | 1546 | Dock7 | Isoform 2 of Dedicator of cytokinesis | −1.12 |
| | | | | protein 7 | |
| IPI:IPI00339428.9 | MS*SHTETSSFLQTLTGR\hat{ } | 1547 | Dock7 | Isoform 2 of Dedicator of cytokinesis | −1.12 |
| | | | | protein 7 | |
| IPI:IPI00339428.9 | MS*SHTETSSFLQTLTGR | 1548 | Dock7 | Isoform 2 of Dedicator of cytokinesis | −1.12 |
| | | | | protein 7 | |
| IPI:IPI00127415.1 | CGSGPVHISGQHLVAVEED | 1549 | Npm1 | Nucleophosmin | −1.119 |
| | AES*EDEDEEDVK@ | | | | |
| IPI:IPI00127415.1 | CGSGPVHISGQHLVAVEED | 1550 | Npm1 | Nucleophosmin | −1.119 |
| | AES*EDEDEEDVK@ | | | | |
| IPI:IPI00331361.2 | S*PSLLQSGVK | 1551 | Mybbp1a | Myb-binding protein 1A | −1.116 |
| IPI:IPI00309059.7 | ST*S*PIIGSPPVR\hat{ } | 1552 | Patl1 | Protein PAT1 homolog 1 | −1.115 |
| IPI:IPI00339428.9 | MSSHTETS*SFLQTLTGR\hat{ } | 1553 | Dock7 | Isoform 2 of Dedicator of cytokinesis | −1.114 |
| | | | | protein 7 | |
| IPI:IPI00123747.1 | LPS*M#GDQEPPGQEK | 1554 | Slc7a11 | Cystine/glutamate transporter | −1.114 |
| IPI:IPI00322095.4 | IDEPNTPYHNMIGDDEDAYS | 1555 | Ppp1r2 | Putative uncharacterized protein | −1.107 |
| | DS*EGNEVM#TPDILAK | | | | |
| IPI:IPI00135379.3 | LSEGEPGPVAAGEQLSEHP | 1556 | Myo9b | Isoform 1 of Myosin-IXb | −1.106 |
| | VEDPESLGVEAETWMNKS* | | | | |
| | PDGMS*PK | | | | |
| IPI:IPI00125319.1 | TTS*FAESCKPVQQPSAFG | 1557 | Gsk3b | Glycogen synthase kinase-3 beta | −1.105 |
| | SMK | | | | |
| IPI:IPI00125319.1 | TTS*FAESCK@PVQQPSAF | 1558 | Gsk3b | Glycogen synthase kinase-3 beta | −1.105 |
| | GSMK@ | | | | |
| IPI:IPI00125319.1 | TTS*FAESCKPVQQPSAFG | 1559 | Gsk3b | Glycogen synthase kinase-3 beta | −1.103 |
| | SMK | | | | |
| IPI:IPI00320208.3 | YGPSSVEDTTGSGAADAKD | 1560 | Eef1b2 | Elongation factor 1-beta | −1.102 |
| | DDDIDLFGS*DDEEESEEAKK | | | | |
| IPI:IPI00331361.2 | SPAPSNPTLS*PS*TPAK@T | 1561 | Mybbp1a | Myb-binding protein 1A | −1.101 |
| | PK@ | | | | |
| IPI:IPI00331361.2 | SPAPSNPTLS*PST*PAKTPK | 1562 | Mybbp1a | Myb-binding protein 1A | −1.101 |
| IPI:IPI00668709.2 | SSS*APNVHINTI | 1563 | Braf | B-Raf protein | −1.097 |
| | EPVNIDDLIR | | | | |
| IPI:IPI00462466.6 | K@LDES*PVLK@PEFIGHD | 1564 | Setd2 | SET domain containing 2 | −1.096 |
| | GR\hat{ } | | | | |
| IPI:IPI00462466.6 | KLDES*PVLKPEFIGHDGR | 1565 | Setd2 | SET domain containing 2 | −1.096 |
| IPI:IPI00108389.5 | LLDGPTGS*S*EEEEEFLEIP | 1566 | Trp53bp1 | Transformation related protein 53 | −1.094 |
| | PFNK | | | binding protein 1 | |
| IPI:IPI00668709.2 | SSS*APNVHINTIEP | 1567 | Braf | B-Raf protein | −1.088 |
| | VNIDDLIR | | | | |
| IPI:IPI00225062.2 | DGSGT*PSRHSLS*GSS*PG | 1568 | Srrm2 | Isoform 3 of Serine/arginine repetitive | −1.081 |
| | M#KDTPQT*PSR | | | matrix protein 2 | |
| IPI:IPI00135971.1 | VQIPVSHPDPEPVS*DNEDD | 1569 | Tjp1 | Tight junction protein ZO-1 | −1.08 |
| | S*YDEEVHDPR | | | | |
| IPI:IPI00127415.1 | CGSGPVHISGQHLVAVEED | 1570 | Npm1 | Nucleophosmin | −1.077 |
| | AES*EDEDEEDVK | | | | |
| IPI:IPI00111169.1 | HIVSNDSSDS*DDEAQGPK@ | 1571 | Pla2g4a | Cytosolic phospholipase A2 | −1.072 |
| IPI:IPI00225670.1 | EVHDELEDLPS*PPPPLSPP | 1572 | Gphn | Gephyrin | −1.07 |
| | PT*TSPHK | | | | |
| IPI:IPI00225670.1 | EVHDELEDLPS*PPPPLS*P | 1573 | Gphn | Gephyrin | −1.07 |
| | PPTTSPHK@ | | | | |
| IPI:IPI00123709.1 | AEDS*GAEQLASEIEPSR | 1574 | Akap12 | Isoform 1 of A-kinase anchor protein 12 | −1.067 |
| IPI:IPI00123709.1 | AEDS*GAEQLASEIEPSR | 1575 | Akap12 | Isoform 1 of A-kinase anchor protein 12 | −1.067 |
| IPI:IPI00454109.2 | S*PPACSSSSSSLFSAVVAR\hat{ } | 1576 | Erf | ETS domain-containing transcription | −1.066 |
| | | | | factor ERF | |
| IPI:IPI00313517.1 | GPPS*EDEGMDIHFEEGVLS | 1577 | | | −1.066 |
| | PSAADMR\hat{ }PEPPNSLDLNG | | | | |
| | SHPR\hat{ } | | | | |
| IPI:IPI00313517.1 | GPPS*EDEGMDIHFEEGVLS | 1578 | | | −1.066 |
| | PSAADMRPEPPNSLDLNGS | | | | |
| | HPR | | | | |
| IPI:IPI00311375.6 | S*GITSLLFGEDDLEALK | 1579 | Sgsm3 | small G protein signaling modulator 3 | −1.061 |
| IPI:IPI00311490.4 | VLS*DS*EEEEKDADVPGTS | 1580 | Phip | PH-interacting protein | −1.059 |
| | TR | | | | |
| IPI:IPI00553798.2 | GHYEVT*GSDDEAGKLQGS | 1581 | Ahnak | AHNAK nucleoprotein isoform 1 | −1.057 |
| | GVSLASK | | | | |
| IPI:IPI00553798.2 | GHYEVTGS*DDEAGK@LQ | 1582 | Ahnak | AHNAK nucleoprotein isoform 1 | −1.057 |
| | GSGVSLASK@ | | | | |
| IPI:IPI00336281.1 | RDSICS*SVSMESSLAEPQD | 1583 | Golga3 | Isoform 1 of Golgin subfamily A | −1.056 |
| | ELLQILK | | | member 3 | |
| IPI:IPI00229859.1 | ALENGEADEPS*FS*DPEDF | 1584 | Eif3b | Eif3b protein | −1.053 |
| | VDDVSEEELLGDVLK | | | | |
| IPI:IPI00668709.2 | DRSSS*APNVHINTIEPVNID | 1585 | Braf | B-Raf protein | −1.048 |
| | DLIR | | | | |
| IPI:IPI00668709.2 | DR\hat{ }SSS*APNVHINTIEPVNI | 1586 | Braf | B-Raf protein | −1.048 |
| | DDLIR\hat{ } | | | | |
| IPI:IPI00125319.1 | T*TSFAESCKPVQQPSAFG | 1587 | Gsk3b | Glycogen synthase kinase-3 beta | −1.047 |
| | SMK | | | | |
| IPI:IPI00135660.5 | RGNNSAVGS*NADLT*IEED | 1588 | Sdpr | Serum deprivation-response protein | −1.046 |
| | EEEEPVALQQAQQVR | | | | |
| IPI:IPI00339428.9 | MSS*HTETSSFLQTLTGR | 1589 | Dock7 | Isoform 2 of Dedicator of cytokinesis | −1.042 |
| | | | | protein 7 | |
| IPI:IPI00127415.1 | CGSGPVHISGQHLVAVEED | 1590 | Npm1 | Nucleophosmin | −1.039 |
| | AES*EDEDEEDVK | | | | |
| IPI:IPI00115660.1 | GPILAT*PGK@ | 1591 | Tcof1 | Treacle protein | −1.038 |
| IPI:IPI00115660.1 | GPILAT*PGK | 1592 | Tcof1 | Treacle protein | −1.038 |
| IPI:IPI00115660.1 | GPILAT*PGK | 1593 | Tcof1 | Treacle protein | −1.038 |
| IPI:IPI00115660.1 | GPILAT*PGK@ | 1594 | Tcof1 | Treacle protein | −1.038 |
| IPI:IPI00230704.4 | KES*APQVLLPEEEK | 1595 | Arhgef7 | Isoform C of Rho guanine nucleotide | −1.036 |
| | | | | exchange factor 7 | |
| IPI:IPI00320422.3 | LQEEGGS*EEEEAGNPSED | 1596 | Pwp1 | Periodic tryptophan protein 1 homolog | −1.035 |
| | GM#QSGPTQAPPR | | | | |
| IPI:IPI00270767.3 | VVKEDGVM#S*PEK | 1597 | Rtn4 | Isoform 2 of Reticulon-4 | −1.035 |
| IPI:IPI00331306.7 | ARQPSQADTGEEDSDEDY* | 1598 | Sh3bp2 | SH3-domain binding protein 2 isoform c | −1.034 |
| | EKVPLPNSVFVNTTESCEV | | | | |
| | ER | | | | |
| IPI:IPI00137864.1 | YDLSNQDHIMDAPPLS*PFP | 1599 | Rbl1 | Isoform Long of Retinoblastoma-like | −1.03 |
| | HIK@ | | | protein 1 | |
| IPI:IPI00137864.1 | YDLSNQDHIMDAPPLS*PFP | 1600 | Rbl1 | Isoform Long of Retinoblastoma-like | −1.03 |
| | HIK | | | protein 1 | |
| IPI:IPI00320208.3 | YGPSSVEDTTGSGAADAK | 1601 | Eef1b2 | Elongation factor 1-beta | −1.028 |
| | @DDDDIDLFGS*DDEEESE | | | | |
| | EAK@K@ | | | | |
| IPI:IPI00404545.2 | SLS*S*PTVTLSAPLEGAK | 1602 | Nedd4l | Isoform 3 of E3 ubiquitin-protein | −1.027 |
| | | | | ligase NEDD4-like | |
| IPI:IPI00127764.2 | VIEDEDGAAAAATVSNSEET | 1603 | Pcm1 | Isoform 1 of Pericentriolar material 1 | −1.024 |
| | PIIENHNS*PQPISDVSAVPC | | | protein | |
| | PR\hat{ } | | | | |
| IPI:IPI00131884.1 | TT*PAPS*PGS*ANESFFAPS | 1604 | Mid1ip1 | Mid1-interacting protein 1 | −1.024 |
| | R\hat{ } | | | | |
| IPI:IPI00131884.1 | TT*PAPS*PGS*ANESFFAPS | 1605 | Mid1ip1 | Mid1-interacting protein 1 | −1.024 |
| | R\hat{ } | | | | |
| IPI:IPI00131884.1 | TT*PAPS*PGS*ANESF | 1606 | Mid1ip1 | Mid1-interacting protein 1 | −1.024 |
| | FAPSR | | | | |
| IPI:IPI00400381.9 | LGST*GS*QPNSEAEPGPEH | 1607 | Phactr4 | Isoform 1 of Phosphatase and actin | −1.02 |
| | APK | | | regulator 4 | |
| IPI:IPI00127415.1 | CGSGPVHISGQHLVAVEED | 1608 | Npm1 | Nucleophosmin | −1.018 |
| | AES*EDEDEEDVK | | | | |
| IPI:IPI00756765.3 | ALVIQESESPPS*PPPS*PDR | 1609 | Ehmt2 | Euchromatic histone lysine N- | −1.017 |
| | \hat{ }R\hat{ } | | | methyltransferase 2 | |
| IPI:IPI00136917.5 | TDQEGLNASQPT*PPPLPK@ | 1610 | C230081A13Rik | Tyrosine-protein kinase-protein kinase | −1.016 |
| IPI:IPI00127415.1 | CGSGPVHISGQHLVAVEED | 1611 | Npm1 | Nucleophosmin | −1.015 |
| | AES*EDEDEEDVK | | | | |
| IPI:IPI00453673.4 | RAS*DGGANIQLHAQQLLK | 1612 | BC033915 | serine/threonine-protein kinase QSK | −1.015 |
| IPI:IPI00453837.2 | KLPPPPPQAPPEEENES*EP | 1613 | Kdm1 | Lysine-specific histone demethylase 1 | −1.014 |
| | EEPSGVEGAAFQSR | | | | |
| IPI:IPI00227900.1 | FKGPGDTSNFDDYEEEEIR | 1614 | Prkaca | Isoform 2 of cAMP-dependent protein | −1.01 |
| | VS*INEK | | | kinase catalytic subunit alpha | |
| IPI:IPI00125662.2 | VDPTYGLESSCIAGTGPDE | 1615 | Smarcc1 | Isoform 1 of SWI/SNF complex subunit | −1.007 |
| | PEK@LEGS*EEEK@M#ETD | | | SMARCC1 | |
| | PDGQQPEK@ | | | | |
| IPI:IPI00677756.1 | KLS*FSMPR | 1616 | Ahnak2 | Putative uncharacterized protein | −1.006 |
| IPI:IPI00395213.1 | LDFLPEMMVDHCS*LNSSP | 1617 | Cugbp1 | Isoform 4 of CUG-BP- and ETR-3-like | −1.002 |
| | VSK@K@ | | | factor 1 | |

Table 8. Gene names and sequences of the phosphopeptides whose intensities decrease after Ku-0063794 treatment. Note that the light cells were treated with rapamycin and serve as controls whereas the heavy cells were treated with a combination of rapamycin and Ku-0063794.

Table 9(a)

| | | | SEQ ID | Gene | | |
|---|---|---|---|---|---|---|
| ID | Reference | Ascore Seq | NO | Name | Annotation | Class |
| 1 | IPI:IPI00121418.1 | DGEGPDNLEPACPLSLPLQ | 1618 | Rb1 | Retinoblastoma-associated | 1 |
| | | GNHTAADMYLS*PLRS*PK | | | protein | |
| 2 | IPI:IPI00221581.1 | TGS*ESS*QTGASATSGR | 1619 | Eif4b | Eukaryotic translation initiation | 1 |
| | | | | | factor 4B | |
| 3 | IPI:IPI00929786.1 | T*ASISSS*PSEGTPAVGSY | 1620 | Larp1 | Isoform 1 of La-related protein 1 | 1 |
| | | GCT*PQS*LPK@ | | | | |
| 4 | IPI:IPI00929786.1 | T*ASISSS*PSEGTPAVGSY* | 1621 | Larp1 | Isoform 1 of La-related protein 1 | 1 |
| | | GCT*PQSLPK@ | | | | |
| 5 | IPI:IPI00929786.1 | T*ASISSS*PSEGTPAVGS*Y | 1622 | Larp1 | Isoform 1 of La-related protein 1 | 1 |
| | | GCTPQSLPK@ | | | | |
| 6 | IPI:IPI00317401.6 | AES*PETSAVESTQST*PQK@ | 1623 | Pds5b | Isoform 1 of Sister chromatid | 1 |
| | | | | | cohesion protein PDS5 homolog B | |
| 7 | IPI:IPI00107958.1 | TSDIFGS*PVTATAPLAHPN | 1624 | Hn1l | Hematological and neurological | 1 |
| | | K@PK@ | | | expressed 1-like protein | |
| 8 | IPI:IPI00108454.2 | R\hat{ }LS*S*LR\hat{ } | 1625 | Rps6 | 29 kDa protein | 1 |
| 9 | IPI:IPI00225062.2 | R\hat{ }SSS*ELS*PEVVEK@ | 1626 | Srrm2 | Isoform 3 of Serine/arginine | 1 |
| | | | | | repetitive matrix protein 2 | |
| 10 | IPI:IPI00761759.1 | S*SS*GS*EHSTEGSVSLGD | 1627 | Larp4 | Putative uncharacterized protein | 1 |
| | | GPLSR\hat{ } | | | | |
| 11 | IPI:IPI00761759.1 | SSS*GSEHS*T*EGSVSLGD | 1628 | Larp4 | Putative uncharacterized protein | 1 |
| | | GPLSR\hat{ } | | | | |
| 12 | IPI:IPI00225062.2 | RSS*SELS*PEVVEK | 1629 | Srrm2 | Isoform 3 of Serine/arginine | 1 |
| | | | | | repetitive matrix protein 2 | |
| 13 | IPI:IPI00122594.4 | TTPLAS*PSLS*PGR\hat{ } | 1630 | Ahctf1 | AT-hook-containing transcription | 1 |
| | | | | | factor 1 | |
| 14 | IPI:IPI00136107.1 | THS*TSS*S*IGSGESPFSR\hat{ } | 1631 | Ndrg3 | Protein NDRG3 | 1 |
| 15 | IPI:IPI00136107.1 | THS*TSSS*IGSGESPFSR\hat{ } | 1632 | Ndrg3 | Protein NDRG3 | 1 |
| 16 | IPI:IPI00136107.1 | THS*TSS*SIGSGESPFSR\hat{ } | 1633 | Ndrg3 | Protein NDRG3 | 1 |
| 17 | IPI:IPI00136107.1 | THS*TSSSIGSGESPFSR\hat{ } | 1634 | Ndrg3 | Protein NDRG3 | 1 |
| 18 | IPI:IPI00136107.1 | T*HST*SSS*IGSGESPFSR\hat{ } | 1635 | Ndrg3 | Protein NDRG3 | 1 |
| 19 | IPI:IPI00136107.1 | THST*SSS*IGSGESPFSR\hat{ } | 1636 | Ndrg3 | Protein NDRG3 | 1 |
| 20 | IPI:IPI00136107.1 | THSTSS*S*IGSGESPFSR\hat{ } | 1637 | Ndrg3 | Protein NDRG3 | 1 |
| 21 | IPI:IPI00136107.1 | T*HSTSSSIGS*GESPFSR\hat{ } | 1638 | Ndrg3 | Protein NDRG3 | 1 |
| 22 | IPI:IPI00136107.1 | THST*SSSIGSGESPFSR\hat{ } | 1639 | Ndrg3 | Protein NDRG3 | 1 |
| 23 | IPI:IPI00551454.3 | ER\hat{ }QES*ESEQELVNK@ | 1640 | Pdcd11 | Protein RRP5 homolog | 1 |
| 24 | IPI:IPI00117229.3 | TS*PAGGTWSSVVSGVPR | 1641 | Atxn2 | ataxin 2 | 1 |
| 25 | IPI:IPI00348442.1 | SK@FDS*DEEDEDAENLEA | 1642 | Sfrs18 | splicing factor arginine/serine-rich | 1 |
| | | VSSGK@ | | | 18 | |
| 26 | IPI:IPI00556837.1 | DTVIIVS*EPS*EDEESHDLP | 1643 | Smarcad1 | Isoform 1 of SWI/SNF-related | 1 |
| | | SVTR | | | matrix-associated actin- | |
| | | | | | dependent regulator of chromatin | |
| | | | | | subfamily A containing DEAD/H | |
| | | | | | box 1 | |
| 27 | IPI:IPI00153986.2 | GTS*RPGT*PSAEAASTSST | 1644 | Gtf2f1 | General transcription factor IIF | 1 |
| | | LR | | | subunit 1 | |
| 28 | IPI:IPI00225062.2 | GCS*PPKS*PEKPPQSTSS* | 1645 | Srrm2 | Isoform 3 of Serine/arginine | 1 |
| | | ESCPPSPQPTK | | | repetitive matrix protein 2 | |
| 29 | IPI:IPI00128904.1 | VMTIPYQPMPASS*PVICAG | 1646 | Pcbp1 | Poly(rC)-binding protein 1 | 1 |
| | | GQDR | | | | |
| 30 | IPI:IPI00121251.7 | LSTTPS*PTNS*LHEDGVDD | 1647 | Tox4 | TOX high mobility group box | 1 |
| | | FRR | | | family member 4 | |
| 31 | IPI:IPI00320594.5 | SQPHSSTSNQETS*DS*EM | 1648 | Ranbp10 | Ran-binding protein 10 | 1 |
| | | EMEAEHYPNGVLESVSTR\hat{ } | | | | |
| 32 | IPI:IPI00808277.2 | SAPAS*PNHAGVLSAHSSG | 1649 | Foxk2 | Isoform 1 of Forkhead box | 1 |
| | | AQT*PES*LSR\hat{ } | | | protein K2 | |
| 33 | IPI:IPI00137166.1 | SR\hat{ }DAT*PPVS*PINMEDQE | 1650 | Junb | Transcription factor jun-B | 1 |
| | | R\hat{ } | | | | |
| 34 | IPI:IPI00454104.1 | TTEAPCSPGS*QQPPS*PD | 1651 | Scrib | Isoform 1 of Protein LAP4 | 1 |
| | | ELPANVK@ | | | | |
| 35 | IPI:IPI00225062.2 | GCS*PPK@S*PEK@PPQST | 1652 | Srrm2 | Isoform 3 of Serine/arginine | 1 |
| | | SSESCPPS*PQPTK@ | | | repetitive matrix protein 2 | |
| 36 | IPI:IPI00153986.2 | GTSR\hat{ }PGT*PS*AEAASTSS | 1653 | Gtf2f1 | General transcription factor IIF | 1 |
| | | TLR\hat{ } | | | subunit 1 | |
| 37 | IPI:IPI00753321.2 | SVSET*SEDK@K@DEES*D | 1654 | Bod1l | biorientation of chromosomes in | 1 |
| | | EEEEEEEEEEPLGATTR\hat{ } | | | cell division 1-like | |
| 38 | IPI:IPI00153986.2 | GT*SR\hat{ }PGT*PSAEAASTSS | 1655 | Gtf2f1 | General transcription factor IIF | 1 |
| | | TLR\hat{ } | | | subunit 1 | |
| 39 | IPI:IPI00153986.2 | GTS*R\hat{ }PGTPS*AEAASTSS | 1656 | Gtf2f1 | General transcription factor IIF | 1 |
| | | TLR\hat{ } | | | subunit 1 | |
| 40 | IPI:IPI00929786.1 | TASIS*S*SPSEGTPAVGSY | 1657 | Larp1 | Isoform 1 of La-related protein 1 | 1 |
| | | GCT*PQSLPK@ | | | | |
| 41 | IPI:IPI00929786.1 | TAS*ISSS*PSEGTPAVGSY | 1658 | Larp1 | Isoform 1 of La-related protein 1 | 1 |
| | | GCT*PQS*LPK@ | | | | |
| 42 | IPI:IPI00130920.1 | RSES*PFEGK | 1659 | Mtap1b | Microtubule-associated protein | 1 |
| | | | | | 1B | |
| 43 | IPI:IPI00336973.2 | GLNLDGTPALSTLGGFS*PA | 1660 | Ccnl1 | Isoform 1 of Cyclin-L1 | 1 |
| | | SK@PS*SPR\hat{ } | | | | |
| 44 | IPI:IPI00336973.2 | GLNLDGTPALSTLGGFS*PA | 1661 | Ccnl1 | Isoform 1 of Cyclin-L1 | 1 |
| | | S*KPSSPR | | | | |
| 45 | IPI:IPI00336973.2 | GLNLDGT*PALSTLGGFS*P | 1662 | Ccnl1 | Isoform 1 of Cyclin-L1 | 1 |
| | | ASK@PS*SPR\hat{ } | | | | |
| 46 | IPI:IPI00336973.2 | GLNLDGTPALSTLGGFSPA | 1663 | Ccnl1 | Isoform 1 of Cyclin-L1 | 1 |
| | | S*K@PS*SPR\hat{ } | | | | |
| 47 | IPI:IPI00379844.4 | TAS*EGDGGAAGGAGTAG | 1664 | Irs2 | Insulin receptor substrate 2 | 1 |
| | | GR\hat{ }PMSVAGS*PLS*PGPV | | | | |
| | | R\hat{ } | | | | |
| 48 | IPI:IPI00336973.2 | GLNLDGTPALSTLGGFS*PA | 1665 | Ccnl1 | Isoform 1 of Cyclin-L1 | 1 |
| | | SKPSS*PR | | | | |
| 49 | IPI:IPI00336973.2 | GLNLDGT*PALSTLGGFS*P | 1666 | Ccnl1 | Isoform 1 of Cyclin-L1 | 1 |
| | | ASKPSS*PR | | | | |
| 50 | IPI:IPI00656285.2 | SLVS*PIPS*PTGTISVPNSC | 1667 | Foxk1 | Forkhead box protein K1 | 1 |
| | | PAS*PR\hat{ } | | | | |
| 51 | IPI:IPI00656285.2 | SLVSPIPSPT*GT*ISVPNSC | 1668 | Foxk1 | Forkhead box protein K1 | 1 |
| | | PAS*PR | | | | |
| 52 | IPI:IPI00454104.1 | TTEAPCS*PGSQQPPS*PD | 1669 | Scrib | Isoform 1 of Protein LAP4 | 1 |
| | | ELPANVK@ | | | | |
| 53 | IPI:IPI00753321.2 | S*VSETSEDK@K@DEES*D | 1670 | Bod1l | biorientation of chromosomes in | 1 |
| | | EEEEEEEEEEPLGATTR\hat{ } | | | cell division 1-like | |
| 54 | IPI:IPI00753321.2 | SVSETS*EDK@K@DEES*D | 1671 | Bod1l | biorientation of chromosomes in | 1 |
| | | EEEEEEEEEEPLGATTR\hat{ } | | | cell division 1-like | |
| 55 | IPI:IPI00313307.3 | SYQNS*PSS*EDGIR\hat{ }PLPE | 1672 | Med1 | Isoform 4 of Mediator of RNA | 1 |
| | | YSTEK@ | | | polymerase II transcription | |
| | | | | | subunit 1 | |
| 56 | IPI:IPI00225062.2 | GCS*PPK@S*PEK@PPQS* | 1673 | Srrm2 | Isoform 3 of Serine/arginine | 1 |
| | | TSSESCPPSPQPTK@ | | | repetitive matrix protein 2 | |
| 57 | IPI:IPI00318938.6 | NS*PVAK@TPPK@DLPAIP | 1674 | Eif4ebp1 | Eukaryotic translation initiation | 1 |
| | | GVTSPTS*DEPPMQASQSQ | | | factor 4E-binding protein 1 | |
| | | LPSSPEDK@ | | | | |
| 58 | IPI:IPI00130920.1 | SLMSS*PEDLTK@DFEELK | 1675 | MtaP1b | Microtubule-associated protein | 1 |
| | | @AEEIDVAK@ | | | 1B | |
| 59 | IPI:IPI00553798.2 | SS*EVVLS*GDDEDYQR\hat{ } | 1676 | Ahnak | AHNAK nucleoprotein isoform 1 | 1 |
| 60 | IPI:IPI00129264.1 | ATSR\hat{ }PINLGPSS*PNTEIH | 1677 | Sorbs3 | Vinexin | 1 |
| | | WTPYR\hat{ } | | | | |
| 61 | IPI:IPI00129264.1 | ATSRPINLGPS*SPNTEIHW | 1678 | Sorbs3 | Vinexin | 1 |
| | | TPYR | | | | |
| 62 | IPI:IPI00123410.5 | TIS*AQDTLAYATALLNEK@ | 1679 | Usp24 | Isoform 1 of Ubiquitin carboxyl- | 1 |
| | | | | | terminal hydrolase 24 | |
| 63 | IPI:IPI00226441.2 | LHYT*PPLQS*PIT*DGDPLL | 1680 | Lin9 | Isoform 2 of Lin-9 homolog | 1 |
| | | GQS*PWR\hat{ } | | | | |
| 64 | IPI:IPI00309059.7 | STS*PIIGS*PPVR\hat{ } | 1681 | Patl1 | Protein PAT1 homolog 1 | 1 |
| 65 | IPI:IPI00336713.1 | CS*PVPGLSSS*PSGSPLHG | 1682 | Bcas3 | Isoform 1 of Breast carcinoma- | 1 |
| | | K@ | | | amplified sequence 3 homolog | |
| 66 | IPI:IPI00320905.7 | LGEQGPEPGPT*PPQTPT* | 1683 | Arhgap17 | Isoform 1 of Rho GTPase- | 1 |
| | | PPS*TPPLAK | | | activating protein 17 | |
| 67 | IPI:IPI00309059.7 | R\hat{ }S*TS*PIIGS*PPVR\hat{ } | 1684 | Patl1 | Protein PAT1 homolog 1 | 1 |
| 68 | IPI:IPI00309059.7 | RSTS*PIIGS*PPVR | 1685 | Patl1 | Protein PAT1 homolog 1 | 1 |
| 69 | IPI:IPI00309059.7 | ST*S*PIIGS*PPVR\hat{ } | 1686 | Patl1 | Protein PAT1 homolog 1 | 1 |
| 70 | IPI:IPI00317599.3 | SQEDEEEIST*SPGVSEFVS | 1687 | Syap1 | Synapse-associated protein 1 | 1 |
| | | DAFDTCSLNQEDLRK | | | | |
| 71 | IPI:IPI00317599.3 | SQEDEEEISTS*PGVSEFVS | 1688 | Syap1 | Synapse-associated protein 1 | 1 |
| | | DAFDTCSLNQEDLRK | | | | |
| 72 | IPI:IPI00656285.2 | SLVS*PIPSPT*GTISVPNS* | 1689 | Foxk1 | Forkhead box protein K1 | 1 |
| | | CPASPR\hat{ } | | | | |
| 73 | IPI:IPI00676574.2 | RVS*TDLPEGQDVYTAACN | 1690 | Herc1 | hect (homologous to the E6-AP | 1 |
| | | SVIHR | | | (UBE3A) carboxyl terminus) | |
| | | | | | domain and RCC1 (CHC1)-like | |
| | | | | | domain (RLD) 1 | |
| 74 | IPI:IPI00458958.2 | DWDK@ES*EGEEPAGGR\hat{ } | 1691 | Rrp15 | RRP15-like protein | 2 |
| 75 | IPI:IPI00230719.8 | R\hat{ }DS*SDDWEIPDGQITVGQ | 1692 | Braf | Isoform 1 of B-Raf proto- | 2 |
| | | R\hat{ } | | | oncogene serine/threonine- | |
| | | | | | protein kinase | |
| 76 | IPI:IPI00318938.6 | VALGDGVQLPPGDYSTT*P | 1693 | Eif4ebp1 | Eukaryotic translation initiation | 2 |
| | | GGTLFSTTPGGT*R | | | factor 4E-binding protein 1 | |
| 77 | IPI:IPI00874995.2 | AS*DDLGEPDVFATAPFR | 1694 | Aak1 | Uncharacterized protein | 2 |
| | | | | | FLJ45252 homolog | |
| 78 | IPI:IPI00318938.6 | VALGDGVQLPPGDYSTT*P | 1695 | Eif4ebp1 | Eukaryotic translation initiation | 2 |
| | | GGTLFSTT*PGGTR\hat{ } | | | factor 4E-binding protein 1 | |
| 79 | IPI:IPI00318938.6 | VALGDGVQLPPGDYSTTPG | 1696 | Eif4ebp1 | Eukaryotic translation initiation | 2 |
| | | GT*LFSTT*PGGTR | | | factor 4E-binding protein 1 | |
| 80 | IPI:IPI00318938.6 | VALGDGVQLPPGDYS*TTP | 1697 | Eif4ebp1 | Eukaryotic translation initiation | 2 |
| | | GGTLFSTT*PGGTR\hat{ } | | | factor 4E-binding protein 1 | |
| 81 | IPI:IPI00323045.3 | S*MDVDLNQAHMEDTPK@ | 1698 | Melk | Maternal embryonic leucine | 2 |
| | | | | | zipper kinase | |
| 82 | IPI:IPI00623284.4 | IWDPTPS*HTPAGAAT*PGR | 1699 | Sf3b1 | Splicing factor 3B subunit 1 | 2 |
| | | GDT*PGHAT*PGHGGATSS | | | | |
| | | AR | | | | |
| 83 | IPI:IPI00125960.1 | TAS*GSS*VTSLEGTR | 1700 | Ndrg1 | Protein NDRG1 | 2 |
| 84 | IPI:IPI00318938.6 | R\hat{ }VALGDGVQLPPGDYSTT | 1701 | Eif4ebp1 | Eukaryotic translation initiation | 2 |
| | | *PGGTLFSTT*PGGTR\hat{ } | | | factor 4E-binding protein 1 | |
| 85 | IPI:IPI00229571.1 | IS*SK@S*PGHMVILNQTK@ | 1702 | Sltm | Isoform 1 of SAFB-like | 2 |
| | | | | | transcription modulator | |
| 86 | IPI:IPI00120095.2 | DFTK@PQDGDIIAPLIT*PLK@ | 1703 | Samhd1 | SAM domain and HD domain- | 2 |
| | | | | | containing protein 1 | |
| 87 | IPI:IPI00340860.5 | T*AS*EGSEAETPEAPK | 1704 | Larp7 | Isoform 1 of La-related protein 7 | 2 |
| 88 | IPI:IPI00664670.4 | LGS*FGSITR\hat{ } | 1705 | Flnc | Isoform 1 of Filamin-C | 2 |
| 89 | IPI:IPI00654192.2 | SLS*FSEPQQPPPTVK@ | 1706 | Zfp395 | zinc finger protein 395 | 2 |
| 90 | IPI:IPI00225062.2 | IHTTALTGQS*PPLASGHQG | 1707 | Srrm2 | Isoform 3 of Serine/arginine | 2 |
| | | EGDAPSVEPGATNIQQPSS | | | repetitive matrix protein 2 | |
| | | *PAPSTK | | | | |
| 91 | IPI:IPI00225062.2 | IHTTALTGQS*PPLASGHQG | 1708 | Srrm2 | Isoform 3 of Serine/arginine | 2 |
| | | EGDAPSVEPGATNIQQPSS | | | repetitive matrix protein 2 | |
| | | *PAPS*TK@ | | | | |
| 92 | IPI:IPI00225062.2 | IHTTALTGQS*PPLASGHQG | 1709 | Srrm2 | Isoform 3 of Serine/arginine | 2 |
| | | EGDAPSVEPGATNIQQPSS | | | repetitive matrix protein 2 | |
| | | *PAPST*K | | | | |
| 93 | IPI:IPI00339428.9 | MSSHT*ETSSFLQTLTGR | 1710 | Dock7 | Isoform 2 of Dedicator of | 2 |
| | | | | | cytokinesis protein 7 | |
| 94 | IPI:IPI00225062.2 | DGSGT*PSRHSLS*GS*S*P | 1711 | Srrm2 | Isoform 3 of Serine/arginine | 2 |
| | | GMKDTPQT*PSR | | | repetitive matrix protein 2 | |
| 95 | IPI:IPI00668709.2 | DRSSS*APNVHINTIEPVNID | 1712 | Braf | B-Raf protein | 2 |
| | | DLIR | | | | |
| 96 | IPI:IPI00135660.5 | RGNNS*AVGS*NADLT*IEE | 1713 | Sdpr | Serum deprivation-response | 2 |
| | | DEEEEPVALQQAQQVR | | | protein | |
| 97 | IPI:IPI00135660.5 | R\hat{ }GNNSAVGS*NADLT*IEE | 1714 | Sdpr | Serum deprivation-response | 2 |
| | | DEEEEPVALQQAQQVR\hat{ } | | | protein | |
| 98 | IPI:IPI00404545.2 | SLS*S*PTVTLSAPLEGAK@ | 1715 | Nedd4l | Isoform 3 of E3 ubiquitin-protein | 2 |
| | | | | | ligase NEDD4-like | |
| 99 | IPI:IPI00121892.9 | R\hat{ }PPS*PDPNTK@ | 1716 | Spnb2 | Isoform 2 of Spectrin beta chain | 2 |
| | | | | | brain 1 | |
| 100 | IPI:IPI00322707.5 | AKQPVIGDQNS*DSDEMLA | 1717 | Atrx | Transcriptional regulator ATRX | 2 |
| | | VLK | | | | |
| 101 | IPI:IPI00929786.1 | SLPT*TVPES*PNYR\hat{ } | 1718 | Larp1 | Isoform 1 of La-related protein 1 | 3 |
| 102 | IPI:IPI00125319.1 | TTS*FAESCK@PVQQPSAF | 1719 | Gsk3b | Glycogen synthase kinase-3 beta | 3 |
| | | GSMK@ | | | | |

Table 9(b)

| | rapa median area | | | |
|---|---|---|---|---|
| ID | ratio | rapa median SN ratio | KU median area ratio | KU median SN ratio |
| 1 | −1.15E+00 | −1.14E+00 | −0.8183 | −0.9318 |
| 2 | −2.1437 | −2.4238 | −0.78695 | −0.9492 |
| 3 | −4.758 | −4.9643 | −0.6283 | −0.5475 |
| 4 | −4.62805 | −4.47925 | −0.6283 | −0.5475 |
| 5 | −3.6217 | −3.885 | −0.6283 | −0.5475 |
| 6 | −1.0246 | −1.0724 | −0.5666 | 0.1321 |
| 7 | −1.881 | −1.90875 | −0.5354 | −0.5361 |
| 8 | −5.2234 | −5.13485 | −0.4254 | −0.6826 |
| 9 | −1.8021 | −2.01515 | −0.4151 | −0.4336 |
| 10 | −1.5621 | −1.0464 | −0.3725 | −0.7405 |
| 11 | −1.4347 | −1.3061 | −0.3725 | −0.7405 |
| 12 | −1.6324 | −1.5779 | −0.3224 | −0.0637 |
| 13 | −1.5511 | −1.71335 | −0.2831 | −0.0584 |
| 14 | −1.78365 | −2.00075 | −0.2767 | 0.0092 |
| 15 | −1.7555 | −2.0749 | −0.2767 | 0.0092 |
| 16 | −1.7499 | −1.7737 | −0.2767 | 0.0092 |
| 17 | −1.5242 | −1.76425 | −0.2767 | 0.0092 |
| 18 | −2.0759 | −2.2586 | −0.2661 | −0.1505 |
| 19 | −1.9707 | −1.7471 | −0.2661 | −0.1505 |
| 20 | −1.8874 | −1.85315 | −0.2661 | −0.1505 |
| 21 | −1.8106 | −1.691 | −0.2661 | −0.1505 |
| 22 | −1.6838 | −1.5207 | −0.2661 | −0.1505 |
| 23 | −2.8898 | −2.7784 | −0.2201 | −0.1513 |
| 24 | −1.0015 | −0.8287 | −0.2135 | −0.3206 |
| 25 | −3.15205 | −2.9693 | −0.213 | 0.1493 |
| 26 | −1.3868 | −0.6688 | −0.1992 | −0.1577 |
| 27 | −1.1818 | −1.15455 | −0.1474 | −0.0308 |
| 28 | −1.7403 | −1.8968 | −0.1417 | 0.6197 |
| 29 | −1.6267 | −1.0033 | −0.139 | −0.2714 |
| 30 | −1.0844 | −1.1514 | −0.106 | −0.2609 |
| 31 | −2.78805 | −1.56635 | −0.1017 | −0.8833 |
| 32 | −3.0877 | −2.2749 | −0.099 | 0.6127 |
| 33 | −2.20425 | −2.1077 | −0.085 | 0.023 |
| 34 | −1.2842 | −0.6546 | −0.0822 | 0.1059 |
| 35 | −1.7868 | −2.1396 | −0.0816 | 0.1618 |
| 36 | −1.2551 | −1.22675 | −0.0656 | −0.106 |
| 37 | −2.9525 | −3.6913 | −0.0637 | 0.7614 |
| 38 | −1.1888 | −1.2446 | −0.014 | −0.0308 |
| 39 | −1.2382 | −1.25285 | −0.0136 | 0.0107 |
| 40 | −2.1557 | −2.1257 | −0.01 | −0.0601 |
| 41 | −4.4981 | −3.9942 | 0.0259 | −0.0762 |
| 42 | −1.7508 | −0.9897 | 0.0386 | 0.3631 |
| 43 | −1.896 | −2.1685 | 0.0563 | 0.2174 |
| 44 | −1.89265 | −2.1434 | 0.0563 | 0.1073 |
| 45 | −1.40465 | −1.02655 | 0.0563 | 0.2174 |
| 46 | −1.896 | −2.1685 | 0.0814 | 0.17005 |
| 47 | −3.6492 | −3.6492 | 0.0966 | 0.0223 |
| 48 | −1.8973 | −2.1434 | 0.1063 | 0.2306 |
| 49 | −1.273 | −0.7556 | 0.1063 | 0.2306 |
| 50 | −2.8428 | −2.9973 | 0.1159 | 0.0362 |
| 51 | −2.8019 | −2.9973 | 0.1159 | 0.0362 |
| 52 | −1.2352 | −0.0592 | 0.1368 | 0.1632 |
| 53 | −3.106 | −3.2482 | 0.1555 | 0.3337 |
| 54 | −2.9525 | −3.6913 | 0.1555 | 0.3337 |
| 55 | −1.298 | −1.4299 | 0.2219 | 0.413 |
| 56 | −1.7403 | −1.8968 | 0.22985 | 0.1085 |
| 57 | −1.3906 | −1.2466 | 0.2704 | 1.5615 |
| 58 | −1.1401 | −1.2853 | 0.2835 | 0.1358 |
| 59 | −2.4187 | −0.9488 | 0.307 | 0.366 |
| 60 | −1.3056 | −1.2452 | 0.3118 | 0.4053 |
| 61 | −1.2719 | −1.0234 | 0.3118 | 0.4053 |
| 62 | −1.4486 | −1.5455 | 0.3219 | 0.2377 |
| 63 | −3.8536 | −3.8536 | 0.3485 | 0.0243 |
| 64 | −1.36155 | −1.26665 | 0.3516 | 0.4392 |
| 65 | −1.889 | −1.727 | 0.3696 | 1.0368 |
| 66 | −2.0572 | −2.2717 | 0.3908 | 0.1481 |
| 67 | −1.626 | −2.0445 | 0.51825 | 0.767 |
| 68 | −1.29335 | −1.2722 | 0.51825 | 0.767 |
| 69 | −1.9492 | −2.05475 | 0.5526 | 0.865 |
| 70 | −1.1567 | −1.0106 | 0.5969 | 0.9976 |
| 71 | −1.1567 | −1.0106 | 0.5969 | 0.9976 |
| 72 | −2.818 | −2.9973 | 1.1365 | 1.0801 |
| 73 | −3.4866 | −3.4138 | 1.2714 | 1.4529 |
| 74 | 0.0401 | −0.1138 | −3.4595 | −5.0415 |
| 75 | 0.011 | −0.1502 | −3.3715 | −3.3715 |
| 76 | −0.22145 | −0.31255 | −2.9948 | −2.3042 |
| 77 | 0.2389 | 0.2797 | −2.8989 | −2.0993 |
| 78 | −0.2639 | −0.32955 | −2.8403 | −2.8893 |
| 79 | −0.2514 | −0.2836 | −2.7755 | −2.167 |
| 80 | −0.2469 | −0.3415 | −2.5654 | −2.1344 |
| 81 | −0.58015 | −0.1451 | −2.5295 | −2.6811 |
| 82 | −0.1752 | 0.3008 | −2.3289 | −2.6763 |
| 83 | 0.2073 | 0.2067 | −2.0546 | −2.0769 |
| 84 | −0.3079 | −0.4553 | −1.759 | −1.6004 |
| 85 | 0.13985 | 0.04745 | −1.5237 | −1.538 |
| 86 | −0.1736 | −0.41725 | −1.3706 | −0.9742 |
| 87 | −0.1646 | −0.2464 | −1.3468 | −1.5444 |
| 88 | 0.3745 | 0.3233 | −1.2893 | −1.2512 |
| 89 | −0.5295 | −0.8185 | −1.1648 | −1.0131 |
| 90 | −0.4199 | −0.3301 | −1.1227 | −0.4758 |
| 91 | −0.2531 | −0.1626 | −1.1227 | −0.4758 |
| 92 | −0.1997 | −0.1626 | −1.1227 | −0.4758 |
| 93 | 0.1923 | 0.3451 | −1.1197 | −1.2356 |
| 94 | −0.0084 | 0.0364 | −1.0814 | −1.582 |
| 95 | −0.3065 | −0.4384 | −1.0477 | −1.431 |
| 96 | −0.18955 | −0.4136 | −1.0458 | −1.0184 |
| 97 | −0.15495 | −0.3246 | −1.0458 | −1.0184 |
| 98 | −0.573 | −0.2978 | −1.0265 | −0.7599 |
| 99 | 0.0109 | −0.0378 | −1.0209 | −0.674 |
| 100 | 0.10215 | 0.0699 | −1.011 | −2.1889 |
| 101 | −2.1207 | −2.1939 | −6.1589 | −5.4183 |
| 102 | −1.71915 | −1.62995 | −1.07715 | −2.06845 |

Table 9. Classification of mTOR targets identified in the Rapamycin and Ku-0063794 screens. Class 1 represents downstream effectors of rapamycin-sensitive mTORC1. Class 2 represents downstream effectors of rapamycin-insensitive mTORC1 or mTORC2. Class 3 represents the proteins downstream of both mTORC1 and mTORC2. Name of the genes and the sequences of the phosphopeptides are shown. Table 9 is provided in two parts because the colums span more than a single page. Table 9(a) contains colums 1-6 of Table 9 and Table 9(b) contains columns 7-10, wherein corresponding entries are identified in an ID column in each section. Information provided in (a) for ID 1 relates to the information provided in (b) for ID 1 and vice versa, information provided in (a) for ID 2 relates to the information provided in (b) for ID 2 and vice versa, and so on.

TABLE 10
Gene ontology analysis of the hits identified in the rapamycin and Ku-0063794 screens. The Table contains
four subsections: Biological processes that the rapamycin-sensitive and Ku-0063794-sensitive hits overrepresented
are identified in the “Rapa BP GO” and “Ku BP GO” subsection, respectively. Pathways that the Rapamycin-
senstitive and Ku-0063794-sensitive hits overrepresented are shown under “Rapa KEGG pathways” and “Ku
KEGG pathways,” respectively. Subsections are displayed in three parts, (a), (b), and (c), because the Table
columns span more than one page. Corresponding entries are identified by an ID number. For example, entries
under ID number 1 in Rapa BP GO (a), (b), and (c) refer to the same entry, entries under ID number 2 in Rapa BP
GO (a), (b), and (c) refer to the same entry, entries under ID number 1 in Rapa KEGG pathways (a), (b), and (c)
refer to the same entry, and so forth.
Rapa BP GO pathways (a):

| ID | Term | Count | % | PValue |
|---|---|---|---|---|
| 1 | GO:0010605~negative regulation of macromolecule | 20 | 10.41666667 | 4.18E−07 |
| | metabolic process | | | |
| 2 | GO:0031327~negative regulation of cellular | 17 | 8.854166667 | 4.17E−06 |
| | biosynthetic process | | | |
| 3 | GO:0010558~negative regulation of macromolecule | 16 | 8.333333333 | 1.31E−05 |
| | biosynthetic process | | | |
| 4 | GO:0045934~negative regulation of nucleobase, | 15 | 7.8125 | 0.0000314 |
| | nucleoside, nucleotide and nucleic acid metabolic | | | |
| | process | | | |
| 5 | GO:0032868~response to insulin stimulus | 6 | 3.125 | 0.000264 |
| 6 | GO:0016481~negative regulation of transcription | 13 | 6.770833333 | 0.000271 |
| 7 | GO:0016192~vesicle-mediated transport | 14 | 7.291666667 | 0.000603 |
| 8 | GO:0032869~cellular response to insulin stimulus | 5 | 2.604166667 | 0.000783 |
| 9 | GO:0051253~negative regulation of RNA | 11 | 5.729166667 | 0.000886 |
| | metabolic process | | | |
| 10 | GO:0051248~negative regulation of protein | 6 | 3.125 | 0.00096 |
| | metabolic process | | | |
| 11 | GO:0006898~receptor-mediated endocytosis | 4 | 2.083333333 | 0.001048574 |
| 12 | GO:0006468~protein amino acid phosphorylation | 16 | 8.333333333 | 0.00137311 |
| 13 | GO:0051276~chromosome organization | 12 | 6.25 | 0.001936745 |
| 14 | GO:0016568~chromatin modification | 9 | 4.6875 | 0.002136023 |
| 15 | GO:0043434~response to peptide hormone stimulus | 6 | 3.125 | 0.002310739 |
| 16 | GO:0032870~cellular response to hormone stimulus | 5 | 2.604166667 | 0.002406516 |
| 17 | GO:0008286~insulin receptor signaling pathway | 4 | 2.083333333 | 0.002457872 |
| 18 | GO:0045892~negative regulation of transcription, | 10 | 5.208333333 | 0.003123471 |
| | DNA dependent | | | |
| 19 | GO:0006325~chromatin organization | 10 | 5.208333333 | 0.003622675 |
| 20 | GO:0046777~protein amino acid autophosphory- | 5 | 2.604166667 | 0.003851564 |
| | lation | | | |
| 21 | GO:0010627~regulation of protein kinase cascade | 7 | 3.645833333 | 0.004027038 |
| 22 | GO:0016310~phosphorylation | 16 | 8.333333333 | 0.004128421 |
| 23 | GO:0051656~establishment of organelle localization | 4 | 2.083333333 | 0.004303328 |
| 24 | GO:0007010~cytoskeleton organization | 10 | 5.208333333 | 0.004531801 |
| 25 | GO:0032535~regulation of cellular component size | 7 | 3.645833333 | 0.004843432 |
| 26 | GO:0022402~cell cycle process | 11 | 5.729166667 | 0.00498568 |
| 27 | GO:0045926~negative regulation of growth | 5 | 2.604166667 | 0.005003024 |
| 28 | GO:0032269~negative regulation of cellular protein | 5 | 2.604166667 | 0.005258125 |
| | metabolic process | | | |
| 29 | GO:0065003~macromolecular complex assembly | 10 | 5.208333333 | 0.005717288 |
| 30 | GO:0032268~regulation of cellular protein metabolic | 9 | 4.6875 | 0.006003754 |
| | process | | | |
| 31 | GO:0000122~negative regulation of transcription | 8 | 4.166666667 | 0.007342706 |
| | from RNA polymerase II promoter | | | |
| 32 | GO:0032319~regulation of Rho GTPase activity | 3 | 1.5625 | 0.007895767 |
| 33 | GO:0046578~regulation of Ras protein signal | 7 | 3.645833333 | 0.008452332 |
| | transduction | | | |
| 34 | GO:0043933~macromolecular complex subunit | 10 | 5.208333333 | 0.009572997 |
| | organization | | | |
| 35 | GO:0006793~phosphorus metabolic process | 17 | 8.854166667 | 0.009756342 |
| 36 | GO:0006796~phosphate metabolic process | 17 | 8.854166667 | 0.009756342 |
| 37 | GO:0006897~endocytosis | 7 | 3.645833333 | 0.010081394 |
| 38 | GO:0010324~membrane invagination | 7 | 3.645833333 | 0.010081394 |
| 39 | GO:0006396~RNA processing | 11 | 5.729166667 | 0.01020022 |
| 40 | GO:0007169~transmembrane receptor protein | 7 | 3.645833333 | 0.01110676 |
| | tyrosine kinase signaling pathway | | | |
| 41 | GO:0010608~posttranscriptional regulation of gene | 6 | 3.125 | 0.01469374 |
| | expression | | | |
| 42 | GO:0045792~negative regulation of cell size | 4 | 2.083333333 | 0.014742447 |
| 43 | GO:0001701~in utero embryonic development | 8 | 4.166666667 | 0.015417559 |
| 44 | GO:0051640~organelle localization | 4 | 2.083333333 | 0.015500935 |
| 45 | GO:0051493~regulation of cytoskeleton organization | 5 | 2.604166667 | 0.015757695 |
| 46 | GO:0007049~cell cycle | 13 | 6.770833333 | 0.015795779 |
| 47 | GO:0006417~regulation of translation | 5 | 2.604166667 | 0.016293879 |
| 48 | GO:0017148~negative regulation of translation | 3 | 1.5625 | 0.019054263 |
| 49 | GO:0034622~cellular macromolecular complex | 7 | 3.645833333 | 0.019238583 |
| | assembly | | | |
| 50 | GO:0008361~regulation of cell size | 5 | 2.604166667 | 0.020996944 |
| 51 | GO:0009725~response to hormone stimulus | 6 | 3.125 | 0.022401918 |
| 52 | GO:0051056~regulation of small GTPase mediated | 7 | 3.645833333 | 0.023850905 |
| | signal transduction | | | |
| 53 | GO:0030029~actin filament-based process | 6 | 3.125 | 0.028573614 |
| 54 | GO:0048729~tissue morphogenesis | 7 | 3.645833333 | 0.028642761 |
| 55 | GO:0001932~regulation of protein amino acid | 5 | 2.604166667 | 0.030261806 |
| | phosphorylation | | | |
| 56 | GO:0008104~protein localization | 14 | 7.291666667 | 0.031319732 |
| 57 | GO:0000278~mitotic cell cycle | 7 | 3.645833333 | 0.031803074 |
| 58 | GO:0034621~cellular macromolecular complex | 7 | 3.645833333 | 0.032351058 |
| | subunit organization | | | |
| 59 | GO:0009719~response to endogenous stimulus | 6 | 3.125 | 0.03367924 |
| 60 | GO:0045449~regulation of transcription | 31 | 16.14583333 | 0.03551581 |
| 61 | GO:0007163~establishment or maintenance of cell | 3 | 1.5625 | 0.036247509 |
| | polarity | | | |
| 62 | GO:0080135~regulation of cellular response to stress | 4 | 2.083333333 | 0.036466875 |
| 63 | GO:0006357~regulation of transcription from RNA | 12 | 6.25 | 0.037453702 |
| | polymerase II promoter | | | |
| 64 | GO:0032314~regulation of Rac GTPase activity | 2 | 1.041666667 | 0.038299417 |
| 65 | GO:0040007~growth | 6 | 3.125 | 0.040063168 |
| 66 | GO:0022403~cell cycle phase | 8 | 4.166666667 | 0.040932988 |
| 67 | GO:0031328-positive regulation of cellular | 11 | 5.729166667 | 0.042602185 |
| | biosynthetic process | | | |
| 68 | GO:0032318~regulation of Ras GTPase activity | 4 | 2.083333333 | 0.042864282 |
| 69 | GO:0010604~positive regulation of macromolecule | 12 | 6.25 | 0.044146336 |
| | metabolic process | | | |
| 70 | GO:0022613~ribonucleoprotein complex biogenesis | 5 | 2.604166667 | 0.044519805 |
| 71 | GO:0009891~positive regulation of biosynthetic | 11 | 5.729166667 | 0.044819532 |
| | process | | | |
| 72 | GO:0046822~regulation of nucleocytoplasmic | 3 | 1.5625 | 0.045236118 |
| | transport | | | |
| 73 | GO:0006346~methylation-dependent chromatin | 2 | 1.041666667 | 0.047644564 |
| | silencing | | | |
| 74 | GO:0016044~membrane organization | 7 | 3.645833333 | 0.049524346 |
| 75 | GO:0007167~enzyme linked receptor protein | 7 | 3.645833333 | 0.05025049 |
| | signaling pathway | | | |
| 76 | GO:0035023~regulation of Rho protein signal | 4 | 2.083333333 | 0.051230918 |
| | transduction | | | |
| 77 | GO:0043009~chordate embryonic development | 9 | 4.6875 | 0.052874272 |
| 78 | GO:0006916~anti-apoptosis | 4 | 2.083333333 | 0.054183284 |
| 79 | GO:0009792~embryonic development ending in | 9 | 4.6875 | 0.055294577 |
| | birth or egg hatching | | | |
| 80 | GO:0044087~regulation of cellular component | 4 | 2.083333333 | 0.055689578 |
| | biogenesis | | | |
| 81 | GO:0006350~transcription | 25 | 13.02083333 | 0.055970599 |
| 82 | GO:0043062~extracellular structure organization | 5 | 2.604166667 | 0.057303217 |
| 83 | GO:0043122~regulation of I-kappaB kinase/ | 3 | 1.5625 | 0.057483236 |
| | NF-kappaB cascade | | | |
| 84 | GO:0051726~regulation of cell cycle | 6 | 3.125 | 0.057658627 |
| 85 | GO:0046907~intracellular transport | 9 | 4.6875 | 0.059056688 |
| 86 | GO:0006260~DNA replication | 5 | 2.604166667 | 0.060776557 |
| 87 | GO:0048598~embryonic morphogenesis | 8 | 4.166666667 | 0.060833555 |
| 88 | GO:0043087~regulation of GTPase activity | 4 | 2.083333333 | 0.061912428 |
| 89 | GO:0051129~negative regulation of cellular | 4 | 2.083333333 | 0.061912428 |
| | component organization | | | |
| 90 | GO:0032386~regulation of intracellular transport | 3 | 1.5625 | 0.062669535 |
| 91 | GO:0033043~regulation of organelle organization | 5 | 2.604166667 | 0.063153096 |
| 92 | GO:0042325~regulation of phosphorylation | 7 | 3.645833333 | 0.063602017 |
| 93 | GO:0045786~negative regulation of cell cycle | 3 | 1.5625 | 0.065320236 |
| 94 | GO:0001570~vasculogenesis | 3 | 1.5625 | 0.065320236 |
| 95 | GO:0045947~negative regulation of translational | 2 | 1.041666667 | 0.066065335 |
| | initiation | | | |
| 96 | GO:0006461~protein complex assembly | 6 | 3.125 | 0.070461851 |
| 97 | GO:0070271~protein complex biogenesis | 6 | 3.125 | 0.070461851 |
| 98 | GO:0030833~regulation of actin filament | 3 | 1.5625 | 0.070731878 |
| | polymerization | | | |
| 99 | GO:0010557~positive regulation of macromolecule | 10 | 5.208333333 | 0.073220823 |
| | biosynthetic process | | | |
| 100 | GO:0019220~regulation of phosphate metabolic | 7 | 3.645833333 | 0.073259901 |
| | process | | | |
| 101 | GO:0051174~regulation of phosphorus metabolic | 7 | 3.645833333 | 0.073259901 |
| | process | | | |
| 102 | GO:0048589~developmental growth | 4 | 2.083333333 | 0.073541659 |
| 103 | GO:0030838~positive regulation of actin filament | 2 | 1.041666667 | 0.075142677 |
| | polymerization | | | |
| 104 | GO:0030308~negative regulation of cell growth | 3 | 1.5625 | 0.076284196 |
| 105 | GO:0030036~actin cytoskeleton organization | 5 | 2.604166667 | 0.077082848 |
| 106 | GO:0031399~regulation of protein modification | 5 | 2.604166667 | 0.077082848 |
| | process | | | |
| 107 | GO:0000902~cell morphogenesis | 7 | 3.645833333 | 0.080785789 |
| 108 | GO:0016477~cell migration | 6 | 3.125 | 0.08471051 |
| 109 | GO:0008064~regulation of actin polymerization or | 3 | 1.5625 | 0.084860387 |
| | depolymerization | | | |
| 110 | GO:0030832~regulation of actin filament length | 3 | 1.5625 | 0.08778162 |
| 111 | GO:0002009~morphogenesis of an epithelium | 5 | 2.604166667 | 0.088103636 |
| 112 | GO:0006333~chromatin assembly or disassembly | 4 | 2.083333333 | 0.089801855 |
| 113 | GO:0010638~positive regulation of organelle | 3 | 1.5625 | 0.090732662 |
| | organization | | | |
| 114 | GO:0045941~positive regulation of transcription | 9 | 4.6875 | 0.091555467 |
| 115 | GO:0006887~exocytosis | 4 | 2.083333333 | 0.091694717 |
| 116 | GO:0008283~cell proliferation | 6 | 3.125 | 0.092969193 |
| 117 | GO:0035020~regulation of Rac protein signal | 2 | 1.041666667 | 0.093035503 |
| | transduction | | | |
| 118 | GO:0000226~microtubule cytoskeleton organization | 4 | 2.083333333 | 0.093604179 |
| 119 | GO:0060562~epithelial tube morphogenesis | 4 | 2.083333333 | 0.093604179 |

Rapa BP GO pathways (b):

| ID | Genes |
|---|---|
| 1 | BCLAF1,FOXK1,GM5611,ZEB2,SAP30,EIP4EBP1,SORBS3,EIF4EBP2,GM7289,FAM129A,HELLS, |
| | IBTK,LOC100046628,NACC1,GM9118,TRIM28,RB1,EHMT2,FLNA,FXR1,GM6477,NFIC,CUX1,LOC |
| | 633387,SMARCA4 |
| 2 | PALM,BCLAF1,NACC1,FOXK1,TRIM28,ZEB2,RB1,EHMT2,FXR1,SAP30,EIF4EBP1,SORBS3, |
| | EIF4EBP2,CUX1,NFIC,HELLS,SMARCA4 |
| 3 | BCLAF1,NACC1,FOXK1,TRIM28,ZEB2,RB1,EHMT2,FXR1,SAP30,EIF4EBP2,SORBS3,EIF4EBP2, |
| | CUX1,NFIC,HELLS,SMARCA4 |
| 4 | PALM,LOC100046628,BCLAF1,NACC1,FOXK1,GM9118,TRIM28,GM5611,ZEB2,RB1,EHMT2, |
| | GM6477,SAP30,SORBS3,NPM1,GM7289,CUX1,NFIC,LOC633387,HELLS,SMARCA4 |
| 5 | ZFP106,IRS2,EIF4EBP1,EIF4EBP2,LOC100048123,LOC544757,MTOR,AKT2 |
| 6 | NACC1,BCLAF1,FOXK1,TRIM28,ZEB2,RB1,EHMT2,SAP30,SORBS3,NFIC,CUX1,HELLS,SMARCA4 |
| 7 | MYO5A,GM8786,LOC100048600,SNX17,ARHGAP17,LLGL1,SCRIB,FLNA,DAB2,CTTN,ULK1,RAB1, |
| | FKBP15,CUX1,ERC1,TRIP10 |
| 8 | ZFP106,IRS2,EIF4EBP1,EIF4DBP2,LOC100048123,LOC544757,AKT2 |
| 9 | LOC100046628,FOXK1,GM9118,TRIM28,GM5611,RB1,EHMT2,GM6477,SAP30,SORBS3,NPM1,GM7 |
| | 289,CUX1,NFIC,LOC633387,HELLS,SMARCA4 |
| 10 | IBTK,EIF4EBP1,EIF4EBP2,FAM129A,FLNA,FXR1 |
| 11 | DAB2,CTTN,GM8786,ULK1,SNX17 |
| 12 | SRPK2,GM4521,BCR,TRIM28,LOC544757,PKN2,WNK1,RPS6KB1,PRKD2,PTK2,LOC100048123,ULK |
| | 1,AAK1,GSK3B,EEF2K,BMP2K,CDK12,MTOR,AKT2 |
| 13 | KDM6A,PDS5B,ARID1A,RB1,EHMT2,1600027N09RIK,SMARCC2,LOC675933,CHD1,KDM3B,TINF2, |
| | HELLS,SMARCA4 |
| 14 | KDM6A,SMARCC2,CHD1,KDM3B,RB1,1600027N09RIK,EHMT2,HELLS,SMARCA4 |
| 15 | ZFP106,IRS2,EIF4EBP1,EIF4EBP2,LOC100048123,LOC544757,MTOR,AKT2 |
| 16 | ZFP106,IRS2,EIF4EBP1,EIF4EBP2,LOC100048123,LOC544757,AKT2 |
| 17 | ZFP106,IRS2,EIF4EBP1,EIF4EBP2 |
| 18 | SAP30,SORBS3,FOXK1,TRIM28,RB1,CUX1,EHMT2,NFIC,HELLS,SMARCA4 |
| 19 | KDM6A,SMARCC2,LOC675933,CHD1,ARID1A,KDM3B,RB1,1600027N09RIK,EHMT2,HELLS, |
| | SMARCA4 |
| 20 | PTK2,ULK1,TRIM28,CDK12,MTOR |
| 21 | PDCD11,SORBS3,LOC100048123,SQSTM1,LOC544757,ZEB2,RICTOR,FLNA,AKT2 |
| 22 | SRPK2,GM4521,BCR,TRIM28,LOC544757,PKN2,WNK1,RPS6KB1,PRKD2,LOC100048123,ULK1, |
| | AAK1,GSK3B,EEF2K,BMP2K,CDK12,MTOR,AKT2 |
| 23 | MYO5A,LOC100046628,PTK2,GM9118,NPM1,GM5611,GM7289,SCRIB,LOC633387,GM6477 |
| 24 | INF2,PALM,LOC100046628,FMNL3,GM9118,GM5611,ARHGAP17,RICTOR,INF2Q,FLNA,GM6477, |
| | PTK2,NPM1,MTAP1B,GM7289,LOC633387,RANBP10 |
| 25 | LOC100046628,GM9118,FOXK1,GM5611,RICTOR,GM6477,ULK1,NPM1,GM7289,SPNA2,MTOR, |
| | DNAJC2,LOC633387 |
| 26 | LOC100046628,PDS5B,ZC3HC1,GM9118,AHCTF1,GM5611,RB1,EHMT2,CD2AP,GM6477,MACF1, |
| | GSK3B,NPM1,GM7289,DNAJC2,LOC633387,HELLS |
| 27 | ATXN2,PTK2,FOXK1,ULK1,DNAJC2 |
| 28 | IBTK,EIF4EBP1,EIF4EBP2,FAM129A,FXR1 |
| 29 | SRPK2,LOC100046628,NACC1,GM9118,AHCTF1,GM5611,FLNA,GM6477,EIF3A,PTK2,GTF2F1, |
| | NPM1,GM7289,LOC633387,HELLS,SMARCA4 |
| 30 | IBTK,EIF4G1,EIF4EBP1,EIF4EBP2,ZEB2,MTOR,RICTOR,FAM129A,FXR1 |
| 31 | SAP30,SORBS3,TRIM28,RB1,CUX1,EHMT2,NFIC,SMARCA4 |
| 32 | MTOR,RICTOR,SCRIB |
| 33 | BCR,GBF1,TBC1D4,MTOR,RICTOR,SCRIB,IQSEC1 |
| 34 | SRPK2,LOC100046628,NACC1,GM9118,AHCTF1,GM5611,FLNA,GM6477,EIF3A,PTK2,GTF2F1,NPM1, |
| | GM7289,LOC633387,HELLS,SMARCA4 |
| 35 | SRPK2,GM4521,BCR,TRIM28,LOC544757,PKN2,WNK1,RPS6KB1,PRKD2,PTK2,LOC100048123,UKL1, |
| | AAK1,GSK3B,CDK12,EEF2K,BMP2K,PPP1R12A,MTOR,AKT2 |
| 36 | SRPK2,GM4521,BCR,TRIM28,LOC544757,PKN2,WNK1,RPS6KB1,PTK2,LOC100048123,ULK1, |
| | AAK1,GSK3B,CDK12,EEF2K,BMP2K,PPP1R12A,MTOR,AKT2 |
| 37 | DAB2,CTTN,GM8786,ULK1,SNX17,FKBP15,TRIP10,SCRIB |
| 38 | DAB2,CTTN,GM8786,ULK1,SNX17,FKBP15,TRIP10,SCRIB |
| 39 | LOC100046766,SRPK2,PDCD11,LOC100046744,EMG1,SFRS1,LOC100047322,RSL1D1,SFRS8,PCBP1, |
| | SRRM2,LARP7,LOC100046735,DHX15,SRRM1,LOC100048559 |
| 40 | ZFP106,GRB10,PTK2,IRS2,EIF4EBP1,EIF4EBP2,FLNA |
| 41 | EIF4G1,EIF4EBP1,EIF4EBP2,FAM129A,FLNA,FXR1 |
| 42 | FOXK1,ULK1,MTOR,DNAJC2 |
| 43 | MIB1,DAB2,SRFS1,TCFEB,JUNB,LOC100048559,MLL2,MED1,SMARCA4 |
| 44 | MYO5A,LOC100046628,PTK2,GM9118,NPM1,GM5611,GM7289,SCRIB,LOC633387,GM6477 |
| 45 | LOC100046628,GM9118,MTAP1B,NPM1,GM5611,SPNA2,GM7289,MTOR,RICTOR,LOC633387, |
| | GM6477 |
| 46 | LOC100046628,ZC3HC1,PDS5B,GM9118,LIN9,GM5611,AHCTF1,RB1,EHMT2,CD2AP,GM6477,NUM |
| | A1,MACF1,GSK3B,NPM1,GM7289,DNAJC2,HELLS,LOC633387 |
| 47 | EIF4G1,EIF4EBP1,EIF4EBP2,FAM129A,FXR1 |
| 48 | EIF4EBP1,EIF4EBP2,FXR1 |
| 49 | SRPK2,PTK2,EIF3A,AHCTF1,HELLS,FLNA,SMARCA4 |
| 50 | LOC100046628,FOXK1,GM9118,ULK1,NPM1,GM5611,GM7289,MTOR,DNAJC2,LOC633387,GM6477 |
| 51 | ZFP106,IRS2,EIF4EBP1,EIF4EBP2,LOC100048123,LOC544757,MTOR,AKT2 |
| 52 | BCR,GBF1,TBC1D4,MTOR,RICTOR,SCRIB,IQSEC1 |
| 53 | MYO5A,INF2,FMNL3,ARHGAP17,RICTOR,INF2Q,FLNA |
| 54 | MIB1,MACF1,TNC,ZEB2,SCRIB,MED1,SMARCA4 |
| 55 | IBTK,ZEB2,MTOR,RICTOR,FAM129A |
| 56 | PALM,LOC100046628,LOC100048600,GM9118,SNX17,GM5611,AHCTF1,FLNA,SCRIB,GM6477, |
| | POM121,ERBB2IP,MACF1,ULK1,RAB1,GSK3B,NPM1,GM7289,SNX30,ERC1,LOC633387 |
| 57 | ZC3HC1,PDS5B,AHCTF1,RB1,CD2AP,DNAJC2,HELLS |
| 58 | SRPK2,PTK2,EIF3A,AHCTF1,HELLS,FLNA,SMARCA4 |
| 59 | ZFP106,IRS2,EIF4EBP1,EIF4EBP2,LOC100048123,LOC1000544757,MTOR,AKT2 |
| 60 | BCLAF1,CARHSP1,FOXK1,FOXK2,AHCTF1,ZEB2,1600027N09RIK,SAP30,SORBS3,GM9791,KDM3B, |
| | TCFEB,DNAJC2,HELLS,NACC1,PDCD11,TRIM28,CCNL1,RB1,EHMT2,JUNB,FLNA,RFC1,GTF2F1, |
| | SMARCC2,TMPO,ZFP516,CUX1,NFIC,PBX2,SMARCA4,MED1 |
| 61 | MACF1,SCRIB,LLGL1 |
| 62 | LOC100046628,LOC100048123,GM9118,NPM1,LOC544757,GM5611,ZEB2,GM7289,MTOR,LOC633387, |
| | AKT2,GM6477 |
| 63 | SAP30,SORBS3,FOXK1,TRIM28,RB1,CUX1,TCFEB,EHMT2,NFIC,PBX2,MED1,SMARCA4 |
| 64 | MTOR,RICTOR |
| 65 | MYO5A,LOC100046628,GM9118,ULK1,NPM1,GM5611,GM7289,EHMT2,LOC633387,MED1,GM6477, |
| | SMARCA4 |
| 66 | ZC3HC1,PDS5B,ACHTF1,RB1,EHTMC2,CD2AP,DNAJC2,HELLS |
| 67 | LOC100046628,GM9118,FOXK1,TRIM28,AHCTF1,GM5611,RB1,GM6477,GTF2F1,NPM1,GM7289, |
| | TCFEB,FAM129A,NFIC,PBX2,LOC633387,MED1 |
| 68 | TBC1D4,MTOR,RICTOR,SCRIB |
| 69 | FOXK1,GTF2F1,TRIM28,AHCTF1,MTOR,RB1,RICTOR,TCFEB,FAM129A,NFIC,PBX2,MED1 |
| 70 | SRPK2,LOC100046628,PDCD11,EIF3A,GM9118,EMG1,NPM1,GM5611,LOC633387,GM6477 |
| 71 | LOC100046628,GM9118,FOXK1,TRIM28,AHCTF1,GM5611,RB1,GM6477,GTF2F1,NPM1,GM7289, |
| | TCFEB,FAM129A,NFIC,PBX2,LOC633387,MED1 |
| 72 | GSK3B,PPP1R12A,FLNA |
| 73 | HELLS,SMARCA4 |
| 74 | DAB2,CTTN,GM8786,ULK1,SNX17,FKBP15,TRIP10,SCRIB |
| 75 | ZFP106,GRB10,PTK2,IRS2,EIF4EBP1,EIF4EBP2,FLNA |
| 76 | BCR,MTOR,RICTOR,SCRIB |
| 77 | MIB1,DAB2,ZEB2,SFRS1,TBFEB,JUNB,LOC100048559,MLL2,MED1,SMARCA4 |
| 78 | AKT1S1,ZC3HC1,GSK3B,HELLS |
| 79 | MIB1,DAB2,ZEB2,SFRS1,TCFEB,JUNB,LOC100048559,MLL2,MED1,SMARCA4 |
| 80 | PTK2,SPNA2,MTOR,RICTOR |
| 81 | BLCAF1,FOXK1,FOXK2,MYEF2,AHCTF1,ZEB2,1600027N09RIK,SAP30,KDM3B,TCFEB,HELLS, |
| | NACC1,TRIM28,CCNL1,RB1,JUNB,PHF3,RFC1,GTF2F1,SMARCC2,ZFP516,NFIC,CUX1,PBX2, |
| | MED1 |
| 82 | MYO5A,PTK2,TNC,LOC100048740,ADAMTS2,SMARCA4 |
| 83 | PDCD11,SQSTM1,FLNA |
| 84 | LOC100046628,BCR,FOXK1,GM9118,NPM1,GM5611,GM7289,RB1,SCRIB,JUNB,LOC633387, |
| | GM6477 |
| 85 | MYO5A,LOC100046628,LOC100048600,GM9118,GM5611,FLNA,GM6477,MACF1,ERBB2IP,GSK3B, |
| | RAB1,NPM1,GM7289,CUX1,ERC1,LOC633387 |
| 86 | RFC1,LIN9,NFIC,DNAJC2,MED1 |
| 87 | MIB1,MACF1,ZEB2,EXT1,PBX2,SCRIB,MED1,SMARCA4 |
| 88 | TBC1D4,MTOR,RICTOR,SCRIB |
| 89 | PTK2,ULK1,MTAP1B,SPNA2 |
| 90 | GSK3B,PPP1R12A,FLNA |
| 91 | LOC100046628,GM9118,MTAP1B,NPM1,GM5611,SPNA2,GM7289,MTOR,RICTOR,LOC633387, |
| | GM6477 |
| 92 | IBTK,LOC100046628,GM9118,GM5611,ZEB2,RICTOR,RB1,GM6477,NPM1,GM7289,MTOR, |
| | FAM129A,LOC633387 |
| 93 | FOXK1,RB1,SCRIB |
| 94 | PTK2,JUNB,SMARCA4 |
| 95 | EIF4EBP1,EIF4EBP2 |
| 96 | LOC100046628,PTK2,NACC1,GM9118,GTF2F1,NPM1,AHCTF1,GM5611,GM7289,LOC633387,FLNA, |
| | GM6477 |
| 97 | LOC100046628,PTK2,NACC1,GM9118,GTF2F1,NPM1,AHCTF1,GM5611,GM7289,LOC633387,FLNA, |
| | GM6477 |
| 98 | SPNA2,MTOR,RICTOR |
| 99 | FOXK1,GTF2F1,TRIM28,AHCTF1,RB1,TCFEB,FAM129A,NFIC,PBX2,MED1 |
| 100 | IBTK,LOC100046628,GM9118,GM5611,ZEB2,RICTOR,RB1,GM6477,NPM1,GM7289,MTOR, |
| | FAM129A,LOC633387 |
| 101 | IBTK,LOC100046628,GM9118,GM5611,ZEB2,RICTOR,RB1,GM6477,NPM1,GM7289,MTOR, |
| | FAM129A,LOC633387 |
| 102 | MYO5A,ULK1,MED1,SMARCA4 |
| 103 | MTOR,RICTOR |
| 104 | FOXK1,ULK1,DNAJC2 |
| 105 | INF2,FMNL3,ARHGAP17,RICTOR,INF2Q,FLNA |
| 106 | IBTK,ZEB2,MTOR,RICTOR,FAM129A |
| 107 | DAB2,PTK2,MACF1,ULK1,TRIM28,SCRIB,LLGL1 |
| 108 | PTK2,TNS1,ULK1,ZEB2,CD2AP,SCRIB |
| 109 | SPNA2,MTOR,RICTOR |
| 110 | SPNA2,MTOR,RICTOR |
| 111 | MIB1,TNC,ZEB2,SCRIB,MED1 |
| 112 | SMARCC2,CHD1,HELLS,SMARCA4 |
| 113 | LOC100046628,GM9118,NPM1,GM5611,GM7289,MTOR,RICTOR,LOC633387,GM6477 |
| 114 | FOXK1,GTF2F1,TRIM28,AHCTF1,RB1,TCFEB,NFIC,PBX2,MED1 |
| 115 | MYO5A,ARHGAP17,SCRIB,LLGL1 |
| 116 | IRS2,GSK3B,ZEB2,SCRIB,HELLS,MED1 |
| 117 | MTOR,RICTOR |
| 118 | LOC100046628,PTK2,GM9118,MTAP1B,NPM1,GM5611,GM7289,LOC633387,RANBP10,GM6477 |
| 119 | MIB1,ZEB2,SCRIB,MED1 |

Rapa BP GO pathways (c):

| | List | Pop | Pop | Fold | | | |
|---|---|---|---|---|---|---|---|
| ID | Total | Hits | Total | Enrichment | Bonferroni | Benjamini | FDR |
| 1 | 133 | 506 | 13588 | 4.038158638 | 0.000424 | 4.24E−04 | 6.62E-04 |
| 2 | 133 | 430 | 13588 | 4.039097744 | 0.00422262 | 0.002113544 | 0.006599221 |
| 3 | 133 | 418 | 13588 | 3.910637839 | 0.013202715 | 0.003317148 | 0.020725619 |
| 4 | 133 | 397 | 13588 | 3.860154164 | 0.031339368 | 0.006347957 | 0.049646045 |
| 5 | 133 | 59 | 13588 | 10.38970307 | 0.234820063 | 0.037513168 | 0.4165415 |
| 6 | 133 | 372 | 13588 | 3.57029671 | 0.240156236 | 0.033747706 | 0.427409635 |
| 7 | 133 | 466 | 13588 | 3.069347188 | 0.458108033 | 0.065811007 | 0.950983483 |
| 8 | 133 | 43 | 13588 | 11.87969925 | 0.548457185 | 0.069730046 | 1.232339007 |
| 9 | 133 | 310 | 13588 | 3.625224351 | 0.593238056 | 0.072219958 | 1.393086083 |
| 10 | 133 | 78 | 13588 | 7.858877964 | 0.622688909 | 0.072234052 | 1.508600184 |
| 11 | 133 | 21 | 13588 | 19.46007877 | 0.655224183 | 0.073240783 | 1.647016896 |
| 12 | 133 | 640 | 13588 | 2.554135338 | 0.752083804 | 0.08878612 | 2.151600307 |
| 13 | 133 | 404 | 13588 | 3.034616244 | 0.860222342 | 0.115719883 | 3.022171324 |
| 14 | 133 | 236 | 13588 | 3.896138652 | 0.885866021 | 0.119855821 | 3.328229194 |
| 15 | 133 | 95 | 13588 | 6.452552434 | 0.904450787 | 0.122300298 | 3.595818606 |
| 16 | 133 | 58 | 13588 | 8.807363236 | 0.913322224 | 0.120774231 | 3.742213886 |
| 17 | 133 | 28 | 13588 | 14.59505908 | 0.917735112 | 0.117406498 | 3.820625016 |
| 18 | 133 | 308 | 13588 | 3.317058881 | 0.958217785 | 0.140327713 | 4.831479072 |
| 19 | 133 | 315 | 13588 | 3.243346461 | 0.974869971 | 0.154173087 | 5.583086162 |
| 20 | 133 | 66 | 13588 | 7.739804056 | 0.980097008 | 0.156587702 | 5.925840566 |
| 21 | 133 | 155 | 13588 | 4.613921902 | 0.983355842 | 0.15688676 | 6.187818747 |
| 22 | 133 | 718 | 13588 | 2.276666597 | 0.984989728 | 0.154613045 | 6.33886821 |
| 23 | 133 | 34 | 13588 | 12.01946042 | 0.987440816 | 0.154948588 | 6.59892672 |
| 24 | 133 | 326 | 13588 | 3.133908391 | 0.990050495 | 0.156967149 | 6.937610234 |
| 25 | 133 | 161 | 13588 | 4.441974501 | 0.992759227 | 0.161382833 | 7.397709501 |
| 26 | 133 | 393 | 13588 | 2.859591727 | 0.993737166 | 0.16048863 | 7.607019539 |
| 27 | 133 | 71 | 13588 | 7.194747432 | 0.993846998 | 0.156076846 | 7.632510001 |
| 28 | 133 | 72 | 13588 | 7.094820384 | 0.995256964 | 0.158538831 | 8.006669044 |
| 29 | 133 | 338 | 13588 | 3.022645371 | 0.997031505 | 0.166286638 | 8.676553117 |
| 30 | 133 | 280 | 13588 | 3.283888292 | 0.997784278 | 0.169076444 | 9.092166954 |
| 31 | 133 | 231 | 13588 | 3.53819614 | 0.999435936 | 0.197489303 | 11.01137247 |
| 32 | 133 | 14 | 13588 | 21.89258861 | 0.999679622 | 0.205375826 | 11.79297815 |
| 33 | 133 | 181 | 13588 | 3.95114859 | 0.99981874 | 0.212838341 | 12.57303844 |
| 34 | 133 | 367 | 13588 | 2.783798734 | 0.999942481 | 0.231930955 | 14.12415408 |
| 35 | 133 | 866 | 13588 | 2.005556617 | 0.999952335 | 0.230394008 | 14.37545544 |
| 36 | 133 | 866 | 13588 | 2.005556617 | 0.999952335 | 0.230394008 | 14.37545544 |
| 37 | 133 | 188 | 13588 | 3.804031355 | 0.999965843 | 0.231800837 | 14.81929399 |
| 38 | 133 | 188 | 13588 | 3.804031355 | 0.999965843 | 0.231800837 | 14.81929399 |
| 39 | 133 | 437 | 13588 | 2.571669448 | 0.999969761 | 0.229071539 | 14.98100495 |
| 40 | 133 | 192 | 13588 | 3.724780702 | 0.99998807 | 0.241565162 | 16.20528578 |
| 41 | 133 | 148 | 13588 | 4.141841089 | 0.999999702 | 0.300740537 | 20.88938812 |
| 42 | 133 | 53 | 13588 | 7.710597248 | 0.999999716 | 0.295721164 | 20.95127119 |
| 43 | 133 | 267 | 13588 | 3.061135986 | 0.999999858 | 0.301224134 | 21.80434851 |
| 44 | 133 | 54 | 13588 | 7.56780841 | 0.99999987 | 0.296980281 | 21.90910181 |
| 45 | 133 | 99 | 13588 | 5.15986937 | 0.9999999 | 0.295639893 | 22.230872 |
| 46 | 133 | 611 | 13588 | 2.173732203 | 0.999999904 | 0.290960801 | 22.27849302 |
| 47 | 133 | 100 | 13588 | 5.108270677 | 0.999999943 | 0.293467107 | 22.89881268 |
| 48 | 133 | 22 | 13588 | 13.9316473 | 0.999999997 | 0.328676558 | 26.2532865 |
| 49 | 133 | 217 | 13588 | 3.295658501 | 0.999999997 | 0.325881168 | 26.47233348 |
| 50 | 133 | 108 | 13588 | 4.729880256 | 1 | 0.344482216 | 28.53155823 |
| 51 | 133 | 165 | 13588 | 3.715105947 | 1 | 0.357404888 | 30.13796653 |
| 52 | 133 | 228 | 13588 | 3.136657433 | 1 | 0.370168333 | 31.75922119 |
| 53 | 133 | 176 | 13588 | 3.482911825 | 1 | 0.420100589 | 36.80211781 |
| 54 | 133 | 238 | 13588 | 3.004865104 | 1 | 0.41509568 | 36.87329018 |
| 55 | 133 | 121 | 13588 | 4.221711303 | 1 | 0.427055137 | 38.51844258 |
| 56 | 133 | 753 | 13588 | 1.89948976 | 1 | 0.432566345 | 39.57163653 |
| 57 | 133 | 244 | 13588 | 2.930974978 | 1 | 0.431978548 | 40.04717075 |
| 58 | 133 | 245 | 13588 | 2.919011815 | 1 | 0.432065576 | 40.58206094 |
| 59 | 133 | 184 | 13588 | 3.331480876 | 1 | 0.439852811 | 41.86001448 |
| 60 | 133 | 2227 | 13588 | 1.422149897 | 1 | 0.452125635 | 43.58475519 |
| 61 | 133 | 31 | 13588 | 9.886975503 | 1 | 0.453613528 | 44.25845315 |
| 62 | 133 | 75 | 13588 | 5.448822055 | 1 | 0.450365735 | 44.4589569 |
| 63 | 133 | 616 | 13588 | 1.990235329 | 1 | 0.454144887 | 45.35260328 |
| 64 | 133 | 4 | 13588 | 51.08270677 | 1 | 0.456547995 | 46.10772521 |
| 65 | 133 | 193 | 13588 | 3.176126846 | 1 | 0.466771241 | 47.65120316 |
| 66 | 133 | 328 | 13588 | 2.491839354 | 1 | 0.469084762 | 48.39705082 |
| 67 | 133 | 552 | 13588 | 2.03590498 | 1 | 0.477872288 | 49.80054252 |
| 68 | 133 | 80 | 13588 | 5.108270677 | 1 | 0.475050206 | 50.01764292 |
| 69 | 133 | 633 | 13588 | 1.936785091 | 1 | 0.480392471 | 51.06697676 |
| 70 | 133 | 137 | 13588 | 3.728664728 | 1 | 0.478500703 | 51.36875 |
| 71 | 133 | 557 | 13588 | 2.017629352 | 1 | 0.476086095 | 51.60967499 |
| 72 | 133 | 35 | 13588 | 8.757035446 | 1 | 0.474622436 | 51.94267678 |
| 73 | 133 | 5 | 13588 | 40.86616541 | 1 | 0.488078471 | 53.82618784 |
| 74 | 133 | 272 | 13588 | 2.629256966 | 1 | 0.497115601 | 55.24796589 |
| 75 | 133 | 273 | 13588 | 2.619625988 | 1 | 0.497699806 | 55.7861226 |
| 76 | 133 | 86 | 13588 | 4.751879699 | 1 | 0.50004125 | 56.50311848 |
| 77 | 133 | 421 | 13588 | 2.184058722 | 1 | 0.506829853 | 57.6805401 |
| 78 | 133 | 88 | 13588 | 4.643882433 | 1 | 0.511161168 | 58.59697919 |
| 79 | 133 | 425 | 13588 | 2.163502875 | 1 | 0.514070595 | 59.36036942 |
| 80 | 133 | 89 | 13588 | 4.591703979 | 1 | 0.512284313 | 59.62851936 |
| 81 | 133 | 1772 | 13588 | 1.441385631 | 1 | 0.509804241 | 59.81828305 |
| 82 | 133 | 149 | 13588 | 3.428369582 | 1 | 0.51404321 | 60.70683174 |
| 83 | 133 | 40 | 13588 | 7.662406015 | 1 | 0.510980221 | 60.82544158 |
| 84 | 133 | 214 | 13588 | 2.864450847 | 1 | 0.507942029 | 60.94067925 |
| 85 | 133 | 431 | 13588 | 2.133384505 | 1 | 0.512485719 | 61.84796511 |
| 86 | 133 | 152 | 13588 | 3.360704393 | 1 | 0.518823826 | 62.93700974 |
| 87 | 133 | 359 | 13588 | 2.276666597 | 1 | 0.515146769 | 62.97259844 |
| 88 | 133 | 93 | 13588 | 4.394211335 | 1 | 0.51755278 | 63.64021648 |
| 89 | 133 | 93 | 13588 | 4.394211335 | 1 | 0.51755278 | 63.64021648 |
| 90 | 133 | 42 | 13588 | 7.297529538 | 1 | 0.518038348 | 64.10197022 |
| 91 | 133 | 154 | 13588 | 3.317058881 | 1 | 0.516945411 | 64.39400928 |
| 92 | 133 | 290 | 13588 | 2.466061706 | 1 | 0.515677628 | 64.66313432 |
| 93 | 133 | 43 | 13588 | 7.127819549 | 1 | 0.521573895 | 65.67569163 |
| 94 | 133 | 43 | 13588 | 7.127819549 | 1 | 0.521573895 | 65.67569163 |
| 95 | 133 | 7 | 13588 | 29.19011815 | 1 | 0.521941211 | 66.10627789 |
| 96 | 133 | 227 | 13588 | 2.700407406 | 1 | 0.541900011 | 68.54571328 |
| 97 | 133 | 227 | 13588 | 2.700407406 | 1 | 0.541900011 | 68.54571328 |
| 98 | 133 | 45 | 13588 | 6.811027569 | 1 | 0.539576096 | 68.69004358 |
| 99 | 133 | 530 | 13588 | 1.927649312 | 1 | 0.548723845 | 69.99148633 |
| 100 | 133 | 301 | 13588 | 2.37593985 | 1 | 0.545243603 | 70.01150996 |
| 101 | 133 | 301 | 13588 | 2.37593985 | 1 | 0.545243603 | 70.01150996 |
| 102 | 133 | 100 | 13588 | 4.086616541 | 1 | 0.543036347 | 70.15551118 |
| 103 | 133 | 8 | 13588 | 25.54135338 | 1 | 0.547458295 | 70.9615401 |
| 104 | 133 | 47 | 13588 | 6.521196609 | 1 | 0.549517711 | 71.52373165 |
| 105 | 133 | 165 | 13588 | 3.095921622 | 1 | 0.549873189 | 71.91098296 |
| 106 | 133 | 165 | 13588 | 3.095921622 | 1 | 0.549873189 | 71.91098296 |
| 107 | 133 | 309 | 13588 | 2.314426844 | 1 | 0.563991497 | 73.64287114 |
| 108 | 133 | 240 | 13588 | 2.554135338 | 1 | 0.578472896 | 75.36897392 |
| 109 | 133 | 50 | 13588 | 6.129924812 | 1 | 0.575662811 | 75.43274213 |
| 110 | 133 | 51 | 13588 | 6.009730208 | 1 | 0.58511535 | 76.64517662 |
| 111 | 133 | 173 | 13588 | 2.952757617 | 1 | 0.583088756 | 76.77534105 |
| 112 | 133 | 109 | 13588 | 3.749189487 | 1 | 0.586996658 | 77.45061982 |
| 113 | 133 | 52 | 13588 | 5.894158473 | 1 | 0.587580562 | 77.81289666 |
| 114 | 133 | 475 | 13588 | 1.93576573 | 1 | 0.58770496 | 78.12859078 |
| 115 | 133 | 110 | 13588 | 3.715105947 | 1 | 0.584982961 | 78.1816002 |
| 116 | 133 | 247 | 13588 | 2.481750936 | 1 | 0.587000314 | 78.66120379 |
| 117 | 133 | 10 | 13588 | 20.43308271 | 1 | 0.584028864 | 78.68588514 |
| 118 | 133 | 111 | 13588 | 3.681636524 | 1 | 0.583150293 | 78.89645491 |
| 119 | 133 | 111 | 13588 | 3.681636524 | 1 | 0.583150293 | 78.89645491 |

Rapa KEGG pathways (a):

| ID | Term | Count | % | PValue | minuslog10P |
|---|---|---|---|---|---|
| 1 | mmu04150:mTOR signaling pathway | 7 | 3.51758794 | 1.57E−06 | 5.8 |
| 2 | mmu04012:ErbB signaling pathway | 6 | 3.015075377 | 3.09E−04 | 3.51 |
| 3 | mmu04910:Insulin signaling pathway | 7 | 3.51758794 | 3.40E−04 | 3.47 |
| 4 | mmu05221:Acute myeloid leukemia | 4 | 2.010050251 | 0.007078848 | 2.15 |
| 5 | mmu04510:Focal adhesion | 6 | 3.015075377 | 0.011465215 | 1.94 |
| 6 | mmu04530:Tight junction | 5 | 2.512562814 | 0.013906132 | 1.86 |
| 7 | mmu052GO:Pathways in cancer | 7 | 3.51758794 | 0.02305239 | 1.64 |
| 8 | mmu05215:Prostate cancer | 4 | 2.010050251 | 0.024273508 | 1.61 |
| 9 | mmu03018:RNA degradation | 3 | 1.507537688 | 0.065096102 | 1.19 |
| 10 | mmu05214:Glioma | 3 | 1.507537688 | 0.072876584 | 1.14 |
| 11 | mmu04920:Adipocytokine signaling | 3 | 1.507537688 | 0.078901015 | 1.1 |
| | pathway | | | | |
| 12 | mmu04370:VEGF signaling pathway | 3 | 1.507537688 | 0.097853719 | 1.01 |
| 13 | mmu05220:Chronic myeloid leukemia | 3 | 1.507537688 | 0.097853719 | 1.01 |

Rapa KEGG pathways (b):

| ID | Genes |
|---|---|
| 1 | IPI00453603,IPI00318938,IPI00399440,IPI00268673,IPI00467843,IPI00221581,IPI00121335 |
| 2 | IPI00125319,IPI00453603,IPI00318938,IPI00113563,IPI00268673,IPI00121335 |
| 3 | IPI00125319,IPI00453603,IPI00116923,IPI00318938,IPI00268673,IPI00379844,IPI00121335 |
| 4 | IPI00453603,IPI00318938,IPI00268673,IPI00121335 |
| 5 | IPI00403938,IPI00125319,IPI00131138,IPI00113563,IPI00671847,IPI00121335 |
| 6 | IPI00118143,IPI00380354,IPI00323349,IPI00845596,IPI00121335 |
| 7 | IPI00125319,IPI00121418,IPI00381495,IPI00113563,IPI00268673,IPI00380817,IPI00121335 |
| 8 | IPI00125319,IPI00121418,IP100268673,IPI00121335 |
| 9 | IPI00169888,IPI00309059,IPI00330066 |
| 10 | IPI00121418,IPI00268673,IPI00121335 |
| 11 | IPI00268673,IPI00379844,IPI00121335 |
| 12 | IPI00111169,IPI00113563,IPI00121335 |
| 13 | IPI00121418,IPI00380817,IPI00121335 |

Rapa KEGG pathways (c):

| ID | List Total | Pop Hits | Pop Total | Fold Enrichment | Bonferroni | Benjamini | FDR |
|---|---|---|---|---|---|---|---|
| 1 | 41 | 54 | 5738 | 18.14182475 | 1.10E−04 | 1.10E−04 | 0.001624292 |
| 2 | 41 | 87 | 5738 | 9.651808242 | 0.02142063 | 0.010768293 | 0.319622391 |
| 3 | 41 | 138 | 5738 | 7.098974903 | 0.023507108 | 0.007897915 | 0.35107298 |
| 4 | 41 | 57 | 5738 | 9.821138211 | 0.391818277 | 0.116903139 | 7.088295684 |
| 5 | 41 | 198 | 5738 | 4.240946046 | 0.553895165 | 0.149082636 | 11.24945571 |
| 6 | 41 | 135 | 5738 | 5.1833785 | 0.624786839 | 0.150728903 | 13.49142317 |
| 7 | 41 | 323 | 5738 | 3.032998565 | 0.804570905 | 0.208022678 | 21.44454537 |
| 8 | 41 | 90 | 5738 | 6.220054201 | 0.820953112 | 0.193469404 | 22.45479997 |
| 9 | 41 | 60 | 5738 | 6.997560976 | 0.991011485 | 0.407576887 | 50.1731853 |
| 10 | 41 | 64 | 5738 | 6.560213415 | 0.994992413 | 0.411206711 | 54.30152323 |
| 11 | 41 | 67 | 5738 | 6.266472515 | 0.99682721 | 0.407268104 | 57.28300003 |
| 12 | 41 | 76 | 5738 | 5.524390244 | 0.999259735 | 0.451577052 | 65.55273205 |
| 13 | 41 | 76 | 5738 | 5.524390244 | 0.999259735 | 0.451577052 | 65.55273205 |

Ku BP GO (a):

| ID | Term | Count | % | PValue |
|---|---|---|---|---|
| 1 | GO:0030032~lamellipodium assembly | 3 | 3.092783505 | 3.25E−03 |
| 2 | GO:0006468~protein amino acid phosphorylation | 10 | 10.30927835 | 7.09E−03 |
| 3 | GO:0008286~insulin receptor signaling pathway | 3 | 3.092783505 | 9.83E−03 |
| 4 | GO:0030029~actin filament-based process | 5 | 5.154639175 | 0.014807537 |
| 5 | GO:0006913~nucleocytoplasmic transport | 4 | 4.12371134 | 0.014880914 |
| 6 | GO:0051493~regulation of cytoskeleton | 4 | 4.12371134 | 0.016150894 |
| | organization | | | |
| 7 | GO:0006796~phosphate metabolic process | 11 | 11.34020619 | 0.016942852 |
| 8 | GO:0006259~DNA metabolic process | 7 | 7.216494845 | 0.025415897 |
| 9 | GO:0045947~negative regulation of transla- | 2 | 2.06185567 | 0.037014038 |
| | tional initiation | | | |
| 10 | GO:0007049~cell cycle | 8 | 8.24742268 | 0.04530749 |
| 11 | GO:0033043~regulation of organelle organization | 4 | 4.12371134 | 0.049959502 |
| 12 | GO:0043484~regulation of RNA splicing | 2 | 2.06185567 | 0.052460451 |
| 13 | GO:0010605~negative regulation of macro- | 7 | 7.216494845 | 0.05420299 |
| | molecule metabolic process | | | |
| 14 | GO:0030031~cell projection assembly | 3 | 3.092783505 | 0.054397233 |
| 15 | GO:0022402~cell cycle process | 6 | 6.18556701 | 0.059968997 |
| 16 | GO:0033554~cellular response to stress | 6 | 6.18556701 | 0.065899107 |
| 17 | GO:0045884~regulation of survival gene product | 2 | 2.06185567 | 0.072676117 |
| | expression | | | |
| 18 | GO:0010558~negative regulation of macro- | 6 | 6.18556701 | 0.073909203 |
| | molecule biosynthetic process | | | |
| 19 | GO:0006916~anti-apoptosis | 3 | 3.092783505 | 0.081129603 |
| 20 | GO:0031327~negative regulation of cellular | 6 | 6.18556701 | 0.081184023 |
| | biosynthetic process | | | |
| 21 | GO:0046907~intracellular transport | 6 | 6.18556701 | 0.081807159 |
| 22 | GO:0009890~negative regulation of biosynthetic | 6 | 6.18556701 | 0.083692072 |
| | process | | | |
| 23 | GO:0006396~RNA processing | 6 | 6.18556701 | 0.085600178 |
| 24 | GO:0051129~negative regulation of cellular | 3 | 3.092783505 | 0.089153114 |
| | component organization | | | |
| 25 | GO:0006325~chromatin organization | 5 | 5.154639175 | 0.08921682 |
| 26 | GO:0030030~cell projection organization | 5 | 5.154639175 | 0.092408475 |
| 27 | GO:0043434~response to peptide hormone | 3 | 3.092783505 | 0.092426596 |
| | stimulus | | | |
| 28 | GO:0016569~covalent chromatin modification | 3 | 3.092783505 | 0.094076504 |
| 29 | GO:0043271~negative regulation of ion transport | 2 | 2.06185567 | 0.097348357 |
| 30 | GO:0007010~cytoskeleton organization | 5 | 5.154639175 | 0.098124703 |

Ku BP GO (b):

| ID | Genes |
|---|---|
| 1 | CCDC88A,NCK1,VCL |
| 2 | ALPK3,BAZ1B,BRAF,MAP3K2,SPNB2,GSK3B,NEK9,RPS6KB1,C230081A13RIK,MELK |
| 3 | PHIP,EIF4EBPI,EIF4EBP2 |
| 4 | EPB4.1L3,NCK1,ARHGEF17,MY09B,FLNC |
| 5 | LOCI 00046628,GM9118,SPNB2,GSK3B,NPM1,GM5611,GM7289,MYBBP1A,LOC633387,GM6477 |
| 6 | LOCI 00046628, CCDC88A,GM9118,SPNB2,MTAP1B,NPM1,GM5611,GM7289,LOC633387, |
| | GM6477 |
| 7 | ALPK3,BAZ1B,BRAF,MAP3K2,SPNB2,GSK3B,SYNJ1,NEK9,RPS6KB1,C230081A13R1K,MELK |
| 8 | ATRX,TRP53BP1,CCDC88A,MDC1,ORC6L,TOP2B,MYC |
| 9 | ElF4EBP1,E1F4EBP2 |
| 10 | LOC100046628,GM9118,RBL1,GM5611,ZFP318,GM6477,MDC1,GSK3B,NPM1,KIF20B,NEK9, |
| | GM7289,LOC633387,ERCC6L |
| 11 | LOC100046628,CCDC88A,GM9118,SPNB2,MTAP1B,NPM1,GM5611,GM7289,LOC633387,GM6477 |
| 12 | LOC100046628,GM9118,GPX4,NPM1,GM5611,GM7289,HNRPLL,LOC633387,GM6477 |
| 13 | LOC100046628,GM9118,RBL1,GM5611,GM6477,EIF4EBP1,EIF4EBP2,NPM1,GM7289,MYC,MYBB |
| | P1A, LOC633387,SMARCA4 |
| 14 | CCDC88A,NCK1,VCL |
| 15 | LOC100046628,GM9118,GSK3B,NPM1,KIF20B,NEK9,GM5611,GM7289,ZFP318,LOC633387, |
| | GM6477,ERCC6L |
| 16 | ATRX,TRP53BP1,BAZ1B,MDC1,GPX4,GSK3B,HNRPLL |
| 17 | AKT1S1,MYC |
| 18 | EIF4EBP1,EIF4EBP2,RBL1,MYBBP1A,MYC,SMARCA4 |
| 19 | AKT1S1,GSK3B,MYC |
| 20 | EIF4EBP1,EIF4EBP2,RBL1,MYBBP1A,MYC,SMARCA4 |
| 21 | LOC100046628,GM9118,SPNB2,GSK3B,NPM1,AKAP12,GM5611,MYO9B,GM7289,MYBBP1A, |
| | LOC633387,GM6477 |
| 22 | EIF4EBP1,EIF4EBP2,RBL1,MYBBP1A,MYC,SMARCA4 |
| 23 | LOC100046766,SF3B1,EXOSC9,LOC100046744,GPX4,LARP7,SRRM2,LOC100046735,POP1, |
| | LOC675032,LOC100047322,HNRPLL |
| 24 | RTN4,SPNB2,MTAP1B |
| 25 | BAZ1B,GPX4,RBL1,SETD2,HNRPLL,SMARCA4 |
| 26 | CCDC88A,NCK1,MTAP1B,TOP2B,VCL |
| 27 | PHIP,EIF4EBP1,EIF4EBP2 |
| 28 | BAZ1B,SETD2,SMARCA4 |
| 29 | BEST3,NEDD4L |
| 30 | EPB4.1L3,LOC100046628,GM9118,NCK1,MTAP1B,NPM1,ARHGEF17,GM5611,GM7289,LOC633387, |
| | GM6477 |

Ku BP GO (c):

| ID | List Total | Pop Hits | Pop Total | Fold Enrichment | Bonferroni | Benjamini | FDR |
|---|---|---|---|---|---|---|---|
| 1 | 74 | 16 | 13588 | 34.42905405 | 0.882872164 | 8.83E−01 | 4.76E+3000 |
| 2 | 74 | 640 | 13588 | 2.869087838 | 0.990722194 | 0.903678632 | 10.0912277 |
| 3 | 74 | 28 | 13588 | 19.67374517 | 0.998498942 | 0.885501679 | 13.73744045 |
| 4 | 74 | 176 | 13588 | 5.216523342 | 0.99994544 | 0.859597701 | 19.99753834 |
| 5 | 74 | 96 | 13588 | 7.650900901 | 0.99994805 | 0.806833826 | 20.08660666 |
| 6 | 74 | 99 | 13588 | 7.419055419 | 0.999977769 | 0.737959309 | 21.61357964 |
| 7 | 74 | 866 | 13588 | 2.332376256 | 0.999986913 | 0.713301589 | 22.55196875 |
| 8 | 74 | 421 | 13588 | 3.053091096 | 0.999999956 | 0.785616066 | 31.95670058 |
| 9 | 74 | 7 | 13588 | 52.46332046 | 1 | 0.87357656 | 43.11139373 |
| 10 | 74 | 611 | 13588 | 2.404211085 | 1 | 0.869178376 | 50.01437111 |
| 11 | 74 | 154 | 13588 | 4.769392769 | 1 | 0.878480874 | 53.53582478 |
| 12 | 74 | 10 | 13588 | 36.72432432 | 1 | 0.875783402 | 55.33191067 |
| 13 | 74 | 506 | 13588 | 2.540220062 | 1 | 0.869599238 | 56.5448088 |
| 14 | 74 | 70 | 13588 | 7.869498069 | 1 | 0.855869756 | 56.678091 |
| 15 | 74 | 393 | 13588 | 2.803383536 | 1 | 0.869269287 | 60.34271545 |
| 16 | 74 | 404 | 13588 | 2.727053786 | 1 | 0.881875859 | 63.92395423 |
| 17 | 74 | 14 | 13588 | 26.23166023 | 1 | 0.895305874 | 67.64630011 |
| 18 | 74 | 418 | 13588 | 2.635717057 | 1 | 0.888826293 | 68.28378078 |
| 19 | 74 | 88 | 13588 | 6.25982801 | 1 | 0.901699824 | 71.78744367 |
| 20 | 74 | 430 | 13588 | 2.562162162 | 1 | 0.892310062 | 71.81242243 |
| 21 | 74 | 431 | 13588 | 2.55621747 | 1 | 0.884669916 | 72.09697589 |
| 22 | 74 | 434 | 13588 | 2.538547764 | 1 | 0.881167309 | 72.94148547 |
| 23 | 74 | 437 | 13588 | 2.521120663 | 1 | 0.877904651 | 73.77204657 |
| 24 | 74 | 93 | 13588 | 5.923278117 | 1 | 0.879820716 | 75.2555379 |
| 25 | 74 | 315 | 13588 | 2.914628915 | 1 | 0.871223772 | 75.28140884 |
| 26 | 74 | 319 | 13588 | 2.878081844 | 1 | 0.872300131 | 76.54568607 |
| 27 | 74 | 95 | 13588 | 5.798577525 | 1 | 0.863873178 | 76.55268842 |
| 28 | 74 | 96 | 13588 | 5.738175676 | 1 | 0.860545996 | 77.18216045 |
| 29 | 74 | 19 | 13588 | 19.32859175 | 1 | 0.862220501 | 78.38406819 |
| 30 | 74 | 326 | 13588 | 2.81628254 | 1 | 0.856532331 | 78.66045069 |

Ku KEGG pathways (a):

| ID | Term | Count | % | PValue | minuslogP |
|---|---|---|---|---|---|
| 1 | mmu04012:ErbB signaling pathway | 6 | 6.060606061 | 2.42E−05 | 4.62 |
| 2 | mmu04150:mTOR signaling pathway | 4 | 4.04040404 | 1.39E−03 | 2.86 |
| 3 | mmu05221:Acute myeloid leukemia | 4 | 4.04040404 | 1.62E−03 | 2.79 |
| 4 | mmu04110:Cell cycle | 4 | 4.04040404 | 0.015586032 | 1.81 |
| 5 | mmu04910:Insulin signaling pathway | 4 | 4.04040404 | 0.01903863 | 1.72 |
| 6 | mmu05213:Endometrial cancer | 3 | 3.03030303 | 0.019575313 | 1.71 |
| 7 | mmu04010:MARK signaling pathway | 5 | 5.050505051 | 0.022772811 | 1.64 |
| 8 | mmu03018:RNA degradation | 3 | 3.03030303 | 0.025605774 | 1.59 |
| 9 | mmu04510:Focal adhesion | 4 | 4.04040404 | 0.048078613 | 1.32 |
| 10 | mmu05210:Colorectal cancer | 3 | 3.03030303 | 0.049516956 | 1.31 |
| 11 | mmu04350:TGF-beta signaling | 3 | 3.03030303 | 0.050554685 | 1.3 |
| | pathway | | | | |

Ku KEGG pathways (b):

| ID | Genes |
|---|---|
| 1 | IPI00453999,IPI00125319,IPI00453603,IPI00230719,IPI00318938,IPI00668709,IPI00131999 |
| 2 | IPI00453603,IPI00230719,IPI00318938,IPI00668709,IPI00221581 |
| 3 | IPI00453603,IPI00230719,IPI00318938,IPI00668709,IPI00131999 |
| 4 | IPI00125319,IPI00124717,IPI00137864,IPI00131999 |
| 5 | IPI00125319,IPI00453603,IPI00230719,IPI00318938,IPI00668709 |
| 6 | IPI00125319,IPI00230719,IPI00668709,IPI00131999 |
| 7 | IPI00230719,IPI00117088,IPI00123474,IPI00668709,IPI00664670,IPI00131999 |
| 8 | IPI00309059,IPI00119442,IPI00330066 |
| 9 | IPI00125319,IPI00230719,IPI00405227,IPI00668709,IPI00664670 |
| 10 | IPI00125319,IPI00230719,IPI00668709,IPI00131999 |
| 11 | IPI00453603,IPI00137864,IPI00131999 |

Ku KEGG pathways (c):

| ID | List Total | Pop Hits | Pop Total | Fold Enrichment | Bonferroni | Benjamini | FDR |
|---|---|---|---|---|---|---|---|
| 1 | 25 | 87 | 5738 | 15.82896552 | 1.38E−03 | 1.38E−03 | 0.023962829 |
| 2 | 25 | 54 | 5738 | 17.00148148 | 0.076050732 | 0.038777202 | 1.366086094 |
| 3 | 25 | 57 | 5738 | 16.10666667 | 0.088400206 | 0.030380355 | 1.596618843 |
| 4 | 25 | 128 | 5738 | 7.1725 | 0.591555799 | 0.200564953 | 14.41914204 |
| 5 | 25 | 138 | 5738 | 6.652753623 | 0.6656829 | 0.196785171 | 17.34826426 |
| 6 | 25 | 52 | 5738 | 13.24153846 | 0.675950335 | 0.171227632 | 17.79538958 |
| 7 | 25 | 265 | 5738 | 4.330566038 | 0.731003969 | 0.171037042 | 20.41453368 |
| 8 | 25 | 60 | 5738 | 11.476 | 0.772029847 | 0.168744085 | 22.67212753 |
| 9 | 25 | 198 | 5738 | 4.636767677 | 0.939707705 | 0.268063281 | 38.63940264 |
| 10 | 25 | 86 | 5738 | 8.006511628 | 0.944686732 | 0.251342928 | 39.55225136 |
| 11 | 25 | 87 | 5738 | 7.914482759 | 0.948025839 | 0.235718393 | 40.20324697 |

TABLE 11

| | |
|---|---|
| Gene Symbol | Annotation |

Rapa replicate 1

| | |
|---|---|
| 1600027N09Rik | RIKEN cDNA 1600027N09 gene |
| Ahctf1 | AT-hook-containing transcription factor 1 |
| Ahnak | AHNAK nucleoprotein isoform 1 |
| Akt1s1 | Proline-rich AKT1 substrate 1 |
| Bat2l | Isoform 1 of Protein BAT2-like |
| Bclaf1 | Isoform 2 of Bcl-2-associated transcription factor 1 |
| Bmp2k | Isoform 1 of BMP-2-inducible protein kinase |
| C130092O11Rik | Isoform 1 of Uncharacterized protein KIAA1680 |
| Carhsp1 | Calcium-regulated heat stable protein 1 |
| Ccn/l | Isoform 1 of Cyclin-L1 |
| Chd1 | Chromodomain-helicase-DNA-binding protein 1 |
| Cttn | Src substrate cortactin |
| D6Wsu116e | Isoform 1 of Protein FAM21 |
| Dab2 | Isoform p93 of Disabled homolog 2 |
| Dock11 | Dedicator of cytokinesis protein 11 |
| Edc4 | Isoform 1 of Enhancer of mRNA-decapping protein 4 |
| Eif3a | Eukaryotic translation initiation factor 3 subunit A |
| Eif4ebp1 | Eukaryotic translation initiation factor 4E-binding protein 1 |
| Eif4ebp2 | Eukaryotic translation initiation factor 4E-binding protein 2 |
| Eif4g1 | Isoform 1 of Eukaryotic translation initiation factor 4 gamma 1 |
| Eif5; LOC100047658 | Eukaryotic translation initiation factor 5 |
| Epyc | Epiphycan |
| Fkbp15 | Isoform B of FK506-binding protein 15 |
| Foxk1 | Forkhead box protein K1 |
| Gm13697 | Novel protein containing MIF4G and MA3 domains |
| Grb10 | Isoform 3 of Growth factor receptor-bound protein 10 |
| Gtf2f1 | General transcription factor IIF subunit 1 |
| Hdgfrp2 | Isoform 3 of Hepatoma-derived growth factor-related protein 2 |
| Hisppd1 | 140 kDa protein |
| Ibtk | Isoform 2 of Inhibitor of Bruton tyrosine kinase |
| Inf2 | Isoform 1 of Inverted formin-2 |
| Iqsec1 | IQ motif and Sec7 domain 1 isoform b |
| Irs2 | Insulin receptor substrate 2 |
| Iws1 | Isoform 1 of Protein IWS1 homolog |
| Kdm3b | Isoform 2 of Lysine-specific demethylase 3B |
| Larp1 | Isoform 1 of La-related protein 1 |
| Larp4 | Putative uncharacterized protein |
| Ldhd | 22 kDa protein |
| Luc7l2 | Isoform 1 of Putative RNA-binding protein Luc7-like 2 |
| Macf1 | Isoform 3 of Microtubule-actin cross-linking factor 1 |
| Mett10d | Isoform 1 of Putative methyltransferase METT10D |
| Mtap1b | Microtubule-associated protein 1B |
| Myef2 | Isoform 2 of Myelin expression factor 2 |
| Myo5a | Myosin-Va |
| Ndrg3 | Protein NDRG3 |
| Nfic | Isoform 1 of Nuclear factor 1 C-type |
| Npm1 | Nucleophosmin |
| Numa1 | Nuclear mitotic apparatus protein 1 |
| Patl1 | Protein PAT1 homolog 1 |
| Pcbp2 | Isoform 1 of Poly(rC)-binding protein 2 |
| Pds5b | Isoform 1 of Sister chromatid cohesion protein PDS5 homolog B |
| Peg3 | Isoform 1 of Paternally-expressed gene 3 protein |
| Phf3 | PHD finger protein 3 |
| Phldb1 | Isoform 2 of Pleckstrin homology-like domain family B member 1 |
| Phldb2 | Isoform 1 of Pleckstrin homology-like domain family B member 2 |
| Pi4k2a | Phosphatidylinositol 4-kinase type 2-alpha |
| Pkn2 | Isoform 1 of Serine/threonine-protein kinase N2 |
| Pla2g4a | Cytosolic phospholipase A2 |
| Plekhm1 | Pleckstrin homology domain-containing family M member 1 |
| Ppp1r12a | MCG122391 isoform CRA_e |
| Rab1 | Ras-related protein Rab-1A |
| Rps6 | 29 kDa protein |
| Rps6kb1 | Isoform Alpha I of Ribosomal protein S6 kinase beta-1 |
| Rsl1d1 | Putative uncharacterized protein |
| Sap30 | Histone deacetylase complex subunit SAP30 |
| Serbp1 | Isoform 1 of Plasminogen activator inhibitor 1 RNA-binding protein |
| Sfrs8 | splicing factor arginine/serine-rich 8 |
| Sgta | Isoform 1 of Small glutamine-rich tetratricopeptide repeat-containing protein alpha |
| Smarca4 | Putative uncharacterized protein |
| Snx17 | Sorting nexin-17 |
| Srpk2 | serine/arginine-rich protein-specific kinase 2 |
| Srrm2 | Isoform 3 of Serine/arginine repetitive matrix protein 2 |
| Syap1 | Synapse-associated protein 1 |
| Tbc1d4 | 140 kDa protein |
| Tcfeb | Transcription factor EB |
| Tjp2 | Tight junction protein ZO-2 |
| Tmem106b | Transmembrane protein 106B isoform CRA_b |
| Tmpo | Isoform Beta of Lamina-associated polypeptide 2 isoforms beta/delta/epsilon/gamma |
| Trim28 | Isoform 1 of Transcription intermediary factor 1-beta |
| Ubxn7 | UBX domain-containing protein 7 |
| Usp24 | Isoform 1 of Ubiquitin carboxyl-terminal hydrolase 24 |
| Uvrag | UV radiation resistance associated |
| Wnk1 | Serine/threonine-protein kinase WNK1 |
| Zc3hc1 | Isoform 1 of Nuclear-interacting partner of ALK |
| Zfp516 | Zinc finger protein 516 |

Rapa Replicate 2

| | |
|---|---|
| Mib1 | E3 ubiquitin-protein ligase MIB1 |
| rsp6 | 29 kDa protein |
| Srrm2 | Isoform 3 of Serine/arginine repetitive matrix protein 2 |
| Gm13099 | Novel protein similar to preferentially expressed antigen in melanoma-like family |
| Rnf19b | IBR domain containing 3 |
| Rps6 | 29 kDa protein |
| Carhsp1 | Calcium-regulated heat stable protein 1 |
| Pgrmc2 | Membrane-associated progesterone receptor component 2 |
| FLNA | Filamin-A |
| Ext1 | Exostosin-1 |
| Gm14085 | Novel protein similar to solute carrier family 28 (Sodium-coupled nucleoside |
| | transporter) member 2 |
| Akt1s1 | Proline-rich AKT1 substrate 1 |
| Gm9757 | Putative uncharacterized protein |
| Eif4ebp2 | Eukaryotic translation initiation factor 4E-binding protein 2 |
| Gon4l | RIKEN cDNA 5830417l10 gene |
| Mogat1 | 2-acylglycerol O-acyltransferase 1 |
| Eef2k | Elongation factor 2 kinase |
| Dhx15 | Putative pre-mRNA-splicing factor ATP-dependent RNA helicase DHX15 |
| Srrm1 | Isoform 2 of Serine/arginine repetitive matrix protein 1 |
| Setd1a | SET domain containing 1A |
| D830015G02Rik | Putative uncharacterized protein |
| Vwa5b1 | von Willebrand factor A domain-containing protein 5B1 |
| Ibtk | Isoform 2 of Inhibitor of Bruton tyrosine kinase |
| Erc1; LOC100048600 | Isoform 1 of ELKS/RAB6-interacting/CAST family member 1 |
| Adamts2 | A disintegrin and metalloproteinase with thrombospondin motifs 2 |
| Grb10 | Isoform 3 of Growth factor receptor-bound protein 10 |
| Foxk1 | Forkhead box protein K1 |
| Gm6988 | similar to hCG1640785 |
| Tnc | Isoform 1 of Tenascin |
| Larp1 | Isoform 1 of La-related protein 1 |
| Alkbh6 | 24 kDa protein |
| Larp7 | Isoform 1 of La-related protein 7 |
| Ahnak | AHNAK nucleoprotein isoform 1 |
| Qsox2 | Isoform 3 of Sulfhydryl oxidase 2 |
| Wnk1 | Serine/threonine-protein kinase WNK1 |
| Megf11 | Isoform 4 of Multiple epidermal growth factor-like domains 11 |
| Ahctf1 | AT-hook-containing transcription factor 1 |
| Fxr1 | Isoform E of Fragile X mental retardation syndrome-related protein 1 |
| Ddx21 | Nucleolar RNA helicase 2 |
| Lin9 | Isoform 2 of Lin-9 homolog |
| D6Wsu116e | Isoform 1 of Protein FAM21 |
| Sfrs8 | splicing factor arginine/serine-rich 8 |
| Ppfibp2 | Isoform 4 of Liprin-beta-2 |
| Hdgfrp2 | Isoform 3 of Hepatoma-derived growth factor-related protein 2 |
| Irs2 | Insulin receptor substrate 2 |
| Tinf2 | Putative uncharacterized protein |
| Hisppd1 | 140 kDa protein |
| Edc3 | Enhancer of mRNA-decapping protein 3 |
| Aim1l | Absent in melanoma 1-like |
| Herc1 | hect (homologous to the E6-AP (UBE3A) carboxyl terminus) domain and RCC1 |
| | (CHC1)-like domain (RLD) 1 |
| Fbxw9 | F-box and WD-40 domain protein 9 |
| Sfrs18 | splicing factor arginine/serine-rich 18 |
| Dnajc2 | DnaJ homolog subfamily C member 2 |
| Cux1 | cut-like homeobox 1 isoform a |
| Ranbp10 | Ran-binding protein 10 |
| Foxk2 | Isoform 1 of Forkhead box protein K2 |
| Bod1l | biorientation of chromosomes in cell division 1-like |
| Zeb2 | Zinc finger E-box-binding homeobox 2 |
| Bcr | Breakpoint cluster region protein |
| Pdcd11 | Protein RRP5 homolog |
| Hn1l | Hematological and neurological expressed 1-like protein |
| Palm | Isoform 1 of Paralemmin |
| Phf3 | PHD finger protein 3 |
| Ptk2 | Isoform 1 of Focal adhesion kinase 1 |
| 1110013L07Rik | Putative uncharacterized protein |
| Tcfeb | Transcription factor EB |
| Ehmt2 | Isoform 1 of Histone-lysine N-methyltransferase H3 lysine-9 specific 3 |
| Zc3h4 | Isoform 2 of Zinc finger CCCH domain-containing protein 4 |
| Ktn1 | Isoform 1 of Kinectin |
| Pbx2 | Pre-B-cell leukemia transcription factor 2 |
| Phldb1 | Isoform 2 of Pleckstrin homology-like domain family B member 1 |
| Cdgap | Cdc42 GTPase-activating protein |
| Eif3a | Eukaryotic translation initiation factor 3 subunit A |
| Tbc1d4 | 140 kDa protein |
| Dennd4a | hypothetical protein LOC102442 |
| Wdr91 | WD repeat-containing protein 91 |
| Junb | Transcription factor jun-B |
| Srpk2 | serine/arginine-rich protein-specific kinase 2 |
| Eif4b | Eukaryotic translation initiation factor 4B |
| Gbf1 | Golgi-specific brefeldin A-resistance factor 1 |
| Cd2ap | CD2-associated protein |
| LOC100048559; Sfrs1 | Isoform 1 of Splicing factor arginine/serine-rich 1 |
| Ccdc6 | coiled-coil domain containing 6 |
| Ndrg3 | Protein NDRG3 |
| Ulk1 | Putative uncharacterized protein |
| Arhgap17 | Isoform 1 of Rho GTPase-activating protein 17 |
| Spna2 | Isoform 2 of Spectrin alpha chain brain |
| Patl1 | Protein PAT1 homolog 1 |
| Bcas3 | Isoform 1 of Breast carcinoma-amplified sequence 3 homolog |
| Atg2a | Autophagy-related protein 2 homolog A |
| Ccnl1 | Isoform 1 of Cyclin-L1 |
| Znrf2 | E3 ubiquitin-protein ligase ZNRF2 |
| Larp4 | Putative uncharacterized protein |
| Mtor | Isoform 1 of FKBP12-rapamycin complex-associated protein |
| Gsk3b | Glycogen synthase kinase-3 beta |
| Ranbp9 | RAN binding protein 9 |
| Kdm6a | Isoform 1 of Lysine-specific demethylase 6A |
| C130092O11Rik | Isoform 1 of Uncharacterized protein KIAA1680 |
| Mtap1b | Microtubule-associated protein 1B |
| Prkd2 | Serine/threonine-protein kinase D2 |
| Usp36 | Ubiquitin specific peptidase 36 |
| Slc4a1ap | solute carrier family 4 (anion exchanger) member 1 adaptor protein |
| Llgl1 | lethal giant larvae homolog 1 isoform 1 |
| Cabin1 | calcineurin binding protein 1 |
| Pcbp1 | Poly(rC)-binding protein 1 |
| Eif4ebp1 | Eukaryotic translation initiation factor 4E-binding protein 1 |
| Rfc1 | Rfc1 protein |
| Pds5b | Isoform 1 of Sister chromatid cohesion protein PDS5 homolog B |
| St5 | Isoform 1 of Suppression of tumorigenicity 5 |
| Eif4g1 | Isoform 1 of Eukaryotic translation initiation factor 4 gamma 1 |
| Pom121 | Nuclear envelope pore membrane protein POM 121 |
| Smarcc2 | Isoform 2 of SWI/SNF complex subunit SMARCC2 |
| Eps8l2 | Isoform 1 of Epidermal growth factor receptor kinase substrate 8-like protein 2 |
| Plekhm1 | Pleckstrin homology domain-containing family M member 1 |
| B230208H17Rik | Putative GTP-binding protein Parf |
| Mll2 | similar to myeloid/lymphoid or mixed-lineage leukemia 2 |
| Snx30 | Sorting nexin-30 |
| Rps6kb1 | Isoform Alpha I of Ribosomal protein S6 kinase beta-1 |
| Usp24 | Isoform 1 of Ubiquitin carboxyl-terminal hydrolase 24 |
| Micall1 | Isoform 1 of MICAL-like protein 1 |
| Med1 | Isoform 4 of Mediator of RNA polymerase II transcription subunit 1 |
| Sorbs3 | Vinexin |
| Phldb2 | Isoform 1 of Pleckstrin homology-like domain family B member 2 |
| Smarcad1 | Isoform 1 of SWI/SNF-related matrix-associated actin-dependent regulator of |
| | chromatin subfamily A containing DEAD/H box 1 |
| Crkrs | Isoform 2 of Cell division cycle 2-related protein kinase 7 |
| Gtf2f1 | General transcription factor IIF subunit 1 |
| Scrib | Isoform 1 of Protein LAP4 |
| 2610110G12Rik | Isoform 1 of UPF0635 protein C6orf134 homolog |
| Mllt4 | Isoform 3 of Afadin |
| Nacc1 | Nucleus accumbens-associated protein 1 |
| Zfp106 | Isoform 1 of Zinc finger protein 106 |
| Rictor | Isoform 1 of Rapamycin-insensitive companion of mTOR |
| Tns1 | tensin 1 |
| Cttn | Src substrate cortactin |
| Sbno1 | Isoform 2 of Protein strawberry notch homolog 1 |
| Fmnl3 | Isoform 1 of Formin-like protein 3 |
| Syap1 | Synapse-associated protein 1 |
| Strn3 | Striatin-3 |
| Rb1 | Retinoblastoma-associated protein |
| Ehbp1 | Isoform 2 of EH domain-binding protein 1 |
| Sqstm1 | Isoform 1 of Sequestosome-1 |
| Zc3hc1 | Isoform 1 of Nuclear-interacting partner of ALK |
| Tox4 | TOX high mobility group box family member 4 |
| Emg1 | Probable ribosome biogenesis protein NEP1 |
| Pcm1 | Isoform 1 of Pericentriolar material 1 protein |
| Trip10 | Isoform 3 of Cdc42-interacting protein 4 |
| LOC100048123; Akt2 | RAC-beta serine/threonine-protein kinase |
| Aak1 | Isoform 2 of AP2-associated protein kinase 1 |
| Srrm2 | Isoform 3 of Serine/arginine repetitive matrix protein 2 |
| Phldb2 | Isoform 1 of Pleckstrin homology-like domain family B member 2 |
| Phldb1 | Isoform 2 of Pleckstrin homology-like domain family B member 1 |
| Ahctf1 | AT-hook-containing transcription factor 1 |
| Ahctf1 | AT-hook-containing transcription factor 1 |
| Ahctf1 | AT-hook-containing transcription factor 1 |
| Arhgap17 | Isoform 1 of Rho GTPase-activating protein 17 |
| Rb1 | Retinoblastoma-associated protein |
| Rb1 | Retinoblastoma-associated protein |
| Tox4 | TOX high mobility group box family member 4 |
| Tox4 | TOX high mobility group box family member 4 |
| Hells | Isoform 1 of Lymphocyte-specific helicase |
| Hells | Isoform 1 of Lymphocyte-specific helicase |
| Hells | Isoform 1 of Lymphocyte-specific helicase |
| Erbb2ip | Isoform 1 of Protein LAP2 |
| Eif4ebp2 | Eukaryotic translation initiation factor 4E-binding protein 2 |
| Eif4ebp2 | Eukaryotic translation initiation factor 4E-binding protein 2 |
| Pds5b | Isoform 1 of Sister chromatid cohesion protein PDS5 homolog B |
| Pds5b | Isoform 1 of Sister chromatid cohesion protein PDS5 homolog B |
| Pds5b | Isoform 1 of Sister chromatid cohesion protein PDS5 homolog B |
| Fam129a | Protein Niban |
| Eif4ebp1 | Eukaryotic translation initiation factor 4E-binding protein 1 |
| Ahnak | AHNAK nucleoprotein isoform 1 |
| Ahnak | AHNAK nucleoprotein isoform 1 |
| Ahnak | AHNAK nucleoprotein isoform 1 |
| Eif4ebp1 | Eukaryotic translation initiation factor 4E-binding protein 1 |
| Arid1a | AT rich interactive domain 1A |
| Fam129a | Protein Niban |
| Fam129a | Protein Niban |
| Atxn2 | ataxin 2 |
| Atxn2 | ataxin 2 |
| Ranbp10 | Ran-binding protein 10 |
| Ranbp10 | Ran-binding protein 10 |
| Ranbp10 | Ran-binding protein 10 |
| Ranbp10 | Ran-binding protein 10 |
| Ranbp10 | Ran-binding protein 10 |
| Tox4 | TOX high mobility group box family member 4 |
| Tox4 | TOX high mobility group box family member 4 |

Ku

| | |
|---|---|
| Myo18a | Isoform 4 of Myosin-XVIIIa |
| Brd2 | Isoform 2 of Bromodomain-containing protein 2 |
| 6330577E15Rik | Uncharacterized protein C10orf78 homolog |
| Best3 | Bestrophin-3 |
| Larp1 | Isoform 1 of La-related protein 1 |
| Fam62c | Isoform 1 of Extended synaptotagmin-3 |
| Mdn1 | Midasin homolog |
| Rtn4 | Isoform 2 of Reticulon-4 |
| Pcdh24 | Pcdh24 protein |
| Synj1 | similar to mKIAA0910 protein |
| Zfp318 | zinc finger protein 318 isoform 1 |
| Akt1s1 | Proline-rich AKT1 substrate 1 |
| Alpk3 | myocyte induction differentiation originator |
| Zc3h14 | Isoform 2 of Zinc finger CCCH domain-containing protein 14 |
| Edc4 | Isoform 1 of Enhancer of mRNA-decapping protein 4 |
| Srrm2 | Isoform 3 of Serine/arginine repetitive matrix protein 2 |
| Kif20b | Isoform 1 of M-phase phosphoprotein 1 |
| 1110007A13Rik | UPF0557 protein C10orf119 homolog |
| Pi4k2a | Phosphatidylinositol 4-kinase type 2-alpha |
| Top2b | DNA topoisomerase 2-beta |
| BC021381 | Isoform 2 of Uncharacterized protein KIAA1931 |
| Bbx | Isoform 1 of HMG box transcription factor BBX |
| Vcl | Vinculin |
| Eif4ebp1 | Eukaryotic translation initiation factor 4E-binding protein 1 |
| Rrp15 | RRP15-like protein |
| D10Wsu102e | Uncharacterized protein C12orf45 homolog |
| Braf | Isoform 1 of B-Raf proto-oncogene serine/threonine-protein kinase |
| Atg2b | Isoform 1 of Autophagy-related protein 2 homolog B |
| Npm1 | Nucleophosmin |
| Pcsk5 | proprotein convertase subtilisin/kexin type 5 |
| Mtap1b | Microtubule-associated protein 1B |
| Ercc6l | DNA excision repair protein ERCC-6-like |
| Serinc1 | Serine incorporator 1 |
| Klf3; LOC100046855 | Krueppel-like factor 3 |
| Smarca4 | Putative uncharacterized protein |
| Aak1 | Uncharacterized protein FLJ45252 homolog |
| Eif4ebp2 | Eukaryotic translation initiation factor 4E-binding protein 2 |
| Ndrg1 | Protein NDRG1 |
| Melk | Maternal embryonic leucine zipper kinase |
| Arhgef17 | Isoform 1 of Rho guanine nucleotide exchange factor 17 |
| Grit | Isoform 2 of Rho/Cdc42/Rac GTPase-activating protein RICS |
| Mdc1 | mediator of DNA damage checkpoint 1 |
| Nfkb2 | NF-kB2 splice variant 4 |
| Pcm1 | Isoform 1 of Pericentriolar material 1 protein |
| Mybbp1a | Myb-binding protein 1A |
| Sf3b1 | Splicing factor 3B subunit 1 |
| Atrx | Transcriptional regulator ATRX |
| Ccdc88a | Isoform 2 of Girdin |
| Baz1b | Isoform 1 of Tyrosine-protein kinase BAZ1B |
| Nedd4l | Isoform 3 of E3 ubiquitin-protein ligase NEDD4-like |
| Orc6l | Origin recognition complex subunit 6 |
| Trp53bp1 | Transformation related protein 53 binding protein 1 |
| Map3k2 | Mitogen-activated protein kinase kinase kinase 2 |
| Hectd2 | Hectd2 protein |
| Usp10 | Ubiquitin carboxyl-terminal hydrolase 10 |
| D830031N03Rik | similar to mKIAA0754 protein |
| Nck1 | non-catalytic region of tyrosine kinase adaptor protein 1 |
| Exosc9 | Exosome complex exonuclease RRP45 |
| Dap | Death-associated protein 1 |
| Rps6kb1 | Isoform Alpha I of Ribosomal protein S6 kinase beta-1 |
| Lmna | Isoform C2 of Lamin-A/C |
| Sltm | Isoform 1 of SAFB-like transcription modulator |
| Sh3pxd2a | Isoform 1 of SH3 and PX domain-containing protein 2A |
| Flnc | Isoform 1 of Filamin-C |
| Oxr1 | Isoform 2 of Oxidation resistance protein 1 |
| Rin2 | Isoform 1 of Ras and Rab interactor 2 |
| Nek9 | Serine/threonine-protein kinase Nek9 |
| Pebp1 | Phosphatidylethanolamine-binding protein 1 |
| Pop1 | Processing of 1 ribonuclease P/MRP family |
| Serhl | Serine hydrolase-like protein |
| Epb4.1l3 | Isoform 1 of Band 4.1-like protein 3 |
| Hnrpll | Isoform 1 of Heterogeneous nuclear ribonucleoprotein L-like |
| Samhd1 | SAM domain and HD domain-containing protein 1 |
| Zfp828 | Zinc finger protein 828 |
| Larp7 | Isoform 1 of La-related protein 7 |
| Myc | myc proto-oncogene protein |
| Myo9a | Isoform 2 of Myosin-IXa |
| Gsk3b | Glycogen synthase kinase-3 beta |
| Zfp395 | zinc finger protein 395 |
| Bend3 | BEN domain-containing protein 3 |
| Akap12 | Isoform 1 of A-kinase anchor protein 12 |
| Eif4g1 | Isoform 1 of Eukaryotic translation initiation factor 4 gamma 1 |
| Eif4b | Eukaryotic translation initiation factor 4B |
| Dock7 | Isoform 2 of Dedicator of cytokinesis protein 7 |
| Patl1 | Protein PAT1 homolog 1 |
| Slc7a11 | Cystine/glutamate transporter |
| Myo9b | Isoform 1 of Myosin-IXb |
| Setd2 | SET domain containing 2 |
| Gphn | Gephyrin |
| Erf | ETS domain-containing transcription factor ERF |
| Spnb2 | Isoform 2 of Spectrin beta chain brain 1 |
| Phip | PH-interacting protein |
| Sdpr | Serum deprivation-response protein |
| Tcof1 | Treacle protein |
| Pwp1 | Periodic tryptophan protein 1 homolog |
| Rb/1 | Isoform Long of Retinoblastoma-like protein 1 |
| Eef1b2 | Elongation factor 1-beta |
| Phactr4 | Isoform 1 of Phosphatase and actin regulator 4 |
| C230081A13Rik | Tyrosine-protein kinase-protein kinase SgK269 |
| Ahnak2 | Putative uncharacterized protein |

Table 11. Proteins with downregulated phosphorylation identified in the rapamycin and Ku-0063794 screen.

1. A method for determining mTOR kinase activity in a cancer cell, the method comprising
(a) obtaining a cancer cell from a subject diagnosed to have a cancer,
(b) determining the level of Grb10 phosphorylation in the cell, and
(c) comparing the level of Grb10 phosphorylation to a reference level, wherein if the level of Grb10 phosphorylation in the cell is higher than the reference level, then the cell is determined to exhibit an elevated level of mTOR kinase activity.

2. The method of claim 1, further comprising selecting a method of treatment based on the cell exhibiting an elevated level of mTOR kinase activity.

3. The method of claim 2, wherein if the cell is determined to exhibit an elevated level of mTOR kinase activity, then the selected method of treatment comprises administering an effective amount of an mTOR kinase inhibitor to the subject.

4. The method of claim 3, wherein the method of treatment further comprises administering an effective amount of a compound that stabilizes Grb10 or that inhibits the degradation of Grb10 and/or an effective amount of a PI3K inhibitor to the subject.

5. The method of claim 3, wherein the mTOR inhibitor is an allosteric mTOR kinase inhibitor or a catalytic mTOR kinase inhibitor.

6. The method of claim 5, wherein the allosteric mTOR kinase inhibitor is rapamycin or a rapamycin analog, or wherein the catalytic mTOR kinase inhibitor is an ATP-competitive mTOR kinase inhibitor.

7. The method of claim 3, wherein the mTOR inhibitor is an mTORC1 inhibitor or an mTORC1/2 inhibitor.

8-10. (canceled)

11. The method of claim 3, wherein the mTOR inhibitor is a dual PI3K/mTOR kinase inhibitor.

12-13. (canceled)

14. The method of claim 4, wherein the PI3K inhibitor is a dual PI3K/mTOR kinase inhibitor.

15. (canceled)

16. The method of claim 3, wherein the method of treatment further comprises administering an effective amount of an Akt inhibitor to the subject.

17. (canceled)

18. The method of claim 4, wherein the compound that inhibits the degradation of Grb10 is a ubiquitin ligase inhibitor.

19. The method of claim 18, wherein the ubiquitin ligase inhibitor is an E3 ubiquitin ligase inhibitor.

20. The method of claim 2, further comprising carrying out the selected method of treatment.

21. A method for selecting a treatment of a cancer, the method comprising,
(a) obtaining a cancer cell from a subject diagnosed to have a cancer exhibiting an elevated level of mTOR activity,
(b) determining the level of Grb10 expression in the cell, and
(c) comparing the level of Grb10 expression to a reference level, wherein if the level of Grb10 expression in the cell is higher than the reference level, then the cell is determined to exhibit a high risk of expressing an elevated level of PI3K, Akt, and/or MAPK activity upon being contacted with an mTORC1 inhibitor.

22. The method of claim 21, the method further comprising selecting a method of treatment based on the cell exhibiting a high risk of expressing an elevated level of PI3K, Akt, and/or MAPK activity upon being contacted with an mTORC1 inhibitor.

23. The method of claim 22, wherein the method of treatment comprises
administering (i) an effective amount of an mTOR kinase inhibitor and/or (ii) an effective amount of an IGF1R, EGFR, PI3K, Akt, MEK, and/or RSK inhibitors and/or of a compound stabilizing Grb10 to the subject, or
administering an effective amount of a dual or multi-target inhibitor that inhibits mTOR and inhibits IGFR, EGFR, PI3K, Akt, MEK, and/or RSK and/or of a compound stabilizing Grb10 to the subject.

24-40. (canceled)

41. A method for determining mTOR kinase activity in a cell, the method comprising
(a) determining the level of phosphorylation of a plurality of phosphorylation sites disclosed in Table 1, 2, 3, 7, or 8, or 11 in the cell; and
(b) comparing the level of phosphorylation determined in step (a) to a reference level, wherein
(i) if the level of phosphorylation determined in step (b) is higher than the reference level, then the cell is determined to exhibit an elevated level of mTOR kinase activity, or
(ii) if the level of phosphorylation determined in step (b) is equal or lower than the reference level, then the cell is determined to not exhibit an elevated level of mTOR kinase activity.

42-78. (canceled)

79. A method for determining mTOR kinase activity in a cell, the method comprising
(a) determining the level of phosphorylation of a phosphorylation site disclosed in Table 1, 2, 3, 7, 8, or 11 in the cell; and
(b) comparing the level of phosphorylation determined in step (a) to a reference level, and
(i) if the level of phosphorylation determined in step (b) is higher than the reference level, then the cell is determined to exhibit an elevated level of mTOR kinase activity, or
(ii) if the level of phosphorylation determined in step (b) is equal or lower than the reference level, then the cell is determined to not exhibit an elevated level of mTOR kinase activity.

80-126. (canceled)

127. A method of identifying an mTOR kinase inhibitor, the method comprising
(a) contacting an mTOR kinase with a polypeptide comprising a phosphorylation site disclosed in Table 1, 2, 3, 7, 8, or 11 under conditions suitable for the mTOR kinase to phosphorylate the phosphorylation site in the presence of a candidate agent,
(b) determining the level of phosphorylation at the phosphorylation site,
(c) comparing the level of phosphorylation determined in step (b) to a reference level, wherein if the level determined in step (b) is lower than the reference level, then the candidate agent is identified as an mTOR kinase inhibitor.

128-139. (canceled)

140. A method for determining mTOR kinase activity in a cell, the method comprising
(a) obtaining a cell from a subject,
(b) determining the level of phosphorylation of a protein selected from the group consisting of Grb10, FOXK1, ZEB2, NDRG3, LARP1, SRPK2, CDK12, MIB1, and IBTK in the cell, and
(c) comparing the level of phosphorylation of the protein to a reference level, wherein if the level of phosphorylation of the protein in the cell is higher than the reference level, then the cell is determined to exhibit an elevated level of mTOR kinase activity.

141-148. (canceled)

The application's sequence listing, which the Patent Office published only in electronic form, follows.

SEQUENCE LISTING (1737 sequences)

SEQ ID NO: 1 - protein, 16 aa, Mus musculus
LSSLRASTSKSESSQK

SEQ ID NO: 2 - protein, 21 aa, Mus musculus
MNILSSQSPLHPSTLNAVIHR

SEQ ID NO: 3 - protein, 26 aa, Mus musculus
AGTTVPESHISFIGDGLVKPEALNKK

SEQ ID NO: 4 - protein, 22 aa, Mus musculus
MSNILSSQSPLHPSTLNAVIHR

SEQ ID NO: 5 - protein, 21 aa, Mus musculus
MNILSSQSPLHPSTLNAVIHR

SEQ ID NO: 6 - protein, 21 aa, Mus musculus
MNILGSQSPLHPSTLSTVIHR

SEQ ID NO: 7 - protein, 536 aa, Homo sapiens
MNASLESLYSACSMQSDTVPLLQNGQHARSQPRASGPPRSIQPQVSPRQRVQRSQPVHILAVRRLQEEDQQFRTSSLPAIPNPFPELCGPGSPPVLTPGSLPPSQAAAKQDVKVFSEDGTSKVVEILADMTARDLCQLLVYKSHCVDDNSWTLVEHHPHLGLERCLEDHELVVQVESTMASESKFLFRKNYAKYEFFKNPMNFFPEQMVTWCQQSNGSQTQLLQNFLNSSSCPEIQGFLHVKELGKKSWKKLYVCLRRSGLYCSTKGTSKEPRHLQLLADLEDSNIFSLIAGRKQYNAPTDHGLCIKPNKVRNETKELRLLCAEDEQTRTCWMTAFRLLKYGMLLYQNYRIPQQRKALLSPFSTPVRSVSENSLVAMDFSGQTGRVIENPAEAQSAALEEGHAWRKRSTRMNILGSQSPLHPSTLSTVIHRTQHWFHGRISREESHRIIKQQGLVDGLFLLRDSQSNPKAFVLTLCHHQKIKNFQILPCEDDGQTFFSLDDGNTKFSDLIQLVDFYQLNKGVLPCKLKHHCIRVAL

SEQ ID NO: 8 - protein, 594 aa, Homo sapiens
MALAGCPDSFLHHPYYQDKVEQTPRSQQDPAGPGLPAQSDRLANHQEDDVDLEALVNDMNASLESLYSACSMQSDTVPLLQNGQHARSQPRASGPPRSIQPQVSPRQRVQRSQPVHILAVRRLQEEDQQFRTSSLPAIPNPFPELCGPGSPPVLTPGSLPPSQAAAKQDVKVFSEDGTSKVVEILADMTARDLCQLLVYKSHCVDDNSWTLVEHHPHLGLERCLEDHELVVQVESTMASESKFLFRKNYAKYEFFKNPMNFFPEQMVTWCQQSNGSQTQLLQNFLNSSSCPEIQGFLHVKELGKKSWKKLYVCLRRSGLYCSTKGTSKEPRHLQLLADLEDSNIFSLIAGRKQYNAPTDHGLCIKPNKVRNETKELRLLCAEDEQTRTCWMTAFRLLKYGMLLYQNYRIPQQRKALLSPFSTPVRSVSENSLVAMDFSGQTGRVIENPAEAQSAALEEGHAWRKRSTRMNILGSQSPLHPSTLSTVIHRTQHWFHGRISREESHRIIKQQGLVDGLFLLRDSQSNPKAFVLTLCHHQKIKNFQILPCEDDGQTFFSLDDGNTKFSDLIQLVDFYQLNKGVLPCKLKHHCIRVAL

SEQ ID NO: 9 - protein, 548 aa, Homo sapiens
MALAGCPDSFLHHPYYQDKVEQTPRSQQDPAGPGLPAQSDRLANHQEDDVDLEALVNDMNASLESLYSACSMQSDTVPLLQNGQHARSQPRASGPPRSIQPQVSPRQRVQRSQPVHILAVRRLQEEDQQFRTSSLPAIPNPFPELCGPGSPPVLTPGSLPPSQAAAKQDVKVFSEDGTSKVVEILADMTARDLCQLLVYKSHCVDDNSWTLVEHHPHLGLERCLEDHELVVQVESTMASESKFLFRKNYAKYEFFKNPMNFFPEQMVTWCQQSNGSQTQLLQEPRHLQLLADLEDSNIFSLIAGRKQYNAPTDHGLCIKPNKVRNETKELRLLCAEDEQTRTCWMTAFRLLKYGMLLYQNYRIPQQRKALLSPFSTPVRSVSENSLVAMDFSGQTGRVIENPAEAQSAALEEGHAWRKRSTRMNILGSQSPLHPSTLSTVIHRTQHWFHGRISREESHRIIKQQGLVDGLFLLRDSQSNPKAFVLTLCHHQKIKNFQILPCEDDGQTFFSLDDGNTKFSDLIQLVDFYQLNKGVLPCKLKHHCIRVAL

SEQ ID NO: 10 - protein, 733 aa, Homo sapiens
MAEVGEDSGARALLALRSAPCSPVLCAAAAAAAFPAAAPPPAPAQPQPPPGPPPPPPPPLPPGAIAGAGSSGGSSGVSGDSAVAGAAPALVAAAAASVRQSPGPALARLEGREFEFLMRQPSVTIGRNSSQGSVDLSMGLSSFISRRHLQLSFQEPHFYLRCLGKNGVFVDGAFQRRGAPALQLPKQCTFRFPSTAIKIQFTSLYHKEEAPASPLRPLYPQISPLKIHIPEPDLRSMVSPVPSPTGTISVPNSCPASPRGAGSSSYRFVQNVTSDLQLAAEFAAKAASEQQADTSGGDSPKDESKPPFSYAQLIVQAISSAQDRQLTLSGIYAHITKHYPYYRTADKGWQNSIRHNLSLNRYFIKVPRSQEEPGKGSFWRIDPASEAKLVEQAFRKRRQRGVSCFRTPFGPLSSRSAPASPTHPGLMSPRSGGLQTPECLSREGSPIPHDPEFGSKLASVPEYRYSQSAPGSPVSAQPVIMAVPPRPSSLVAKPVAYMPASIVTSQQPAGHAIHVVQQAPTVTMVRVVTTSANSANGYILTSQGAAGGSHDAAGAAVLDLGSEARGLEEKPTIAFATIPAAGGVIQTVASQMAPGVPGHTVTILQPATPVTLGQHHLPVRAVTQNGKHAVPTNSLAGNAYALTSPLQLLATQASSSAPVVVTRVCEVGPKEPAAAVAATATTTPATATTASASASSTGEPEVKRSRVEEPSGAVTTPAGVIAAAGPQGPGTGE

SEQ ID NO: 11 - protein, 1190 aa, Homo sapiens
MKQPIMADGPRCKRRKQANPRRKNVVNYDNVVDTGSETDEEDKLHIAEDDGIANPLDQETSPASVPNHESSPHVSQALLPREEEEDEIREGGVEHPWHNNEILQASVDGPVKNANCTSDFEEYFAKRKLEERDGHAVSIEEYLQRSDTAIIYPEAPEELSRLGTPEANGQEENDLPPGTPDAFAQLLTCPYCDRGYKRLTSLKEHIKYRHEKNEENFSCPLCSYTFAYRTQLERHMVTHKPGTDQHQMLTQGAGNRKFKCTECGKAFKYKHHLKEHLRIHSGEKPYECPNCKKRFSHSGSYSSHISSKKCIGLISVNGRMRNNIKTGSSPNSVSSSPTNSAITQLRNKLENGKPLSMSEQTGLLKIKTEPLDFNDYKVLMATHGFSGTSPFMNGGLGATSPLGVHPSAQSPMQHLGVGMEAPLLGFPTMNSNLSEVQKVLQIVDNTVSRQKMDCKAEEISKLKGYHMKDPCSQPEEQGVTSPNIPPVGLPVVSHNGATKSIIDYTLEKVNEAKACLQSLTTDSRRQISNIKKEKLRTLIDLVTDDKMIENHNISTPFSCQFCKESFPGPIPLHQHERYLCKMNEEIKAVLQPHENIVPNKAGVFVDNKALLLSSVLSEKGMTSPINPYKDHMSVLKAYYAMNMEPNSDELLKISIAVGLPQEFVKEWFEQRKVYQYSNSRSPSLERSSKPLAPNSNPPTKDSLLPRSPVKPMDSITSPSIAELHNSVTNCDPPLRLTKPSHFTNIKPVEKLDHSRSNTPSPLNLSSTSSKNSHSSSYTPNSFSSEELQAEPLDLSLPKQMKEPKSIIATKNKTKASSISLDHNSVSSSSENSDEPLNLTFIKKEFSNSNNLDNKSTNPVFSMNPFSAKPLYTALPPQSAFPPATFMPPVQTSIPGLRPYPGLDQMSFLPHMAYTYPTGAATFADMQQRRKYQRKQGFQGELLDGAQDYMSGLDDMTDSDSCLSRKKIKKTESGMYACDLCDKTFQKSSSLLRHKYEHTGKRPHQCQICKKAFKHKHHLIEHSRLHSGEKPYQCDKCGKRFSHSGSYSQHMNHRYSYCKREAEEREAAEREAREKGHLEPTELLMNRAYLQSITPQGYSDSEERESMPRDGESEKEHEKEGEDGYGKLGRQDGDEEFEEEEEESENKSMDTDPETIRDEEETGDHSMDDSSEDGKMETKSDHEEDNMEDGM

SEQ ID NO: 12 - protein, 1214 aa, Homo sapiens
MKQPIMADGPRCKRRKQANPRRKNVVNYDNVVDTGSETDEEDKLHIAEDDGIANPLDQETSPASVPNHESSPHVSQALLPREEEEDEIREGGVEHPWHNNEILQASVDGPEEMKEDYDTMGPEATIQTAINNGTVKNANCTSDFEEYFAKRKLEERDGHAVSIEEYLQRSDTAIIYPEAPEELSRLGTPEANGQEENDLPPGTPDAFAQLLTCPYCDRGYKRLTSLKEHIKYRHEKNEENFSCPLCSYTFAYRTQLERHMVTHKPGTDQHQMLTQGAGNRKFKCTECGKAFKYKHHLKEHLRIHSGEKPYECPNCKKRFSHSGSYSSHISSKKCIGLISVNGRMRNNIKTGSSPNSVSSSPTNSAITQLRNKLENGKPLSMSEQTGLLKIKTEPLDFNDYKVLMATHGFSGTSPFMNGGLGATSPLGVHPSAQSPMQHLGVGMEAPLLGFPTMNSNLSEVQKVLQIVDNTVSRQKMDCKAEEISKLKGYHMKDPCSQPEEQGVTSPNIPPVGLPVVSHNGATKSIIDYTLEKVNEAKACLQSLTTDSRRQISNIKKEKLRTLIDLVTDDKMIENHNISTPFSCQFCKESFPGPIPLHQHERYLCKMNEEIKAVLQPHENIVPNKAGVFVDNKALLLSSVLSEKGMTSPINPYKDHMSVLKAYYAMNMEPNSDELLKISIAVGLPQEFVKEWFEQRKVYQYSNSRSPSLERSSKPLAPNSNPPTKDSLLPRSPVKPMDSITSPSIAELHNSVTNCDPPLRLTKPSHFTNIKPVEKLDHSRSNTPSPLNLSSTSSKNSHSSSYTPNSFSSEELQAEPLDLSLPKQMKEPKSIIATKNKTKASSISLDHNSVSSSSENSDEPLNLTFIKKEFSNSNNLDNKSTNPVFSMNPFSAKPLYTALPPQSAFPPATFMPPVQTSIPGLRPYPGLDQMSFLPHMAYTYPTGAATFADMQQRRKYQRKQGFQGELLDGAQDYMSGLDDMTDSDSCLSRKKIKKTESGMYACDLCDKTFQKSSSLLRHKYEHTGKRPHQCQICKKAFKHKHHLIEHSRLHSGEKPYQCDKCGKRFSHSGSYSQHMNHRYSYCKREAEEREAAEREAREKGHLEPTELLMNRAYLQSITPQGYSDSEERESMPRDGESEKEHEKEGEDGYGKLGRQDGDEEFEEEEEESENKSMDTDPETIRDEEETGDHSMDDSSEDGKMETKSDHEEDNMEDGM

SEQ ID NO: 13 - protein, 363 aa, Homo sapiens
MDELQDVQLTEIKPLLNDKEHDIETTHGVVHVTIRGLPKGNRPVILTYHDIGLNHKSCFNAFFNFEDMQEITQHFAVCHVDAPGQQEGAPSFPTGYQYPTMDELAEMLPPVLTHLSLKSIIGIGVGAGAYILSRFALNHPELVEGLVLINVDPCAKGWIDWAASKLSGLTTNVVDIILAHHFGQEELQANLDLIQTYRMHIAQDINQDNLQLFLNSYNGRRDLEIERPILGQNDNKSKTLKCSTLLVVGDNSPAVEAVVECNSRLNPINTTLLKMADCGGLPQVVQPGKLTEAFKYFLQGMGYIPSASMTRLARSRTHSTSSSLGSGESPFSRSVTSNQSDGTQESCESPDVLDRHQTMEVSC

SEQ ID NO: 14 - protein, 375 aa, Homo sapiens
MDELQDVQLTEIKPLLNDKNGTRNFQDFDCQEHDIETTHGVVHVTIRGLPKGNRPVILTYHDIGLNHKSCFNAFFNFEDMQEITQHFAVCHVDAPGQQEGAPSFPTGYQYPTMDELAEMLPPVLTHLSLKSIIGIGVGAGAYILSRFALNHPELVEGLVLINVDPCAKGWIDWAASKLSGLTTNVVDIILAHHFGQEELQANLDLIQTYRMHIAQDINQDNLQLFLNSYNGRRDLEIERPILGQNDNKSKTLKCSTLLVVGDNSPAVEAVVECNSRLNPINTTLLKMADCGGLPQVVQPGKLTEAFKYFLQGMGYIPSASMTRLARSRTHSTSSSLGSGESPFSRSVTSNQSDGTQESCESPDVLDRHQTMEVSC

SEQ ID NO: 15 - protein, 1019 aa, Homo sapiens
MLWRVLLSKRPPFPHPELDFQEAPIPSCPGRLPGRKNSVALAAAPRKEPTGDREKPLPFPVLAPFSNPEHSAPAKVVRAAVPKQRKGSKVGDFGDAINWPTPGEIAHKSVQPQSHKPQPTRKLPPKKDMKEQEKGEGSDSKESPKTKSDESGEEKNGDEDCQRGGQKKKGNKHKWVPLQIDMKPEVPREKLASRPTRPPEPRHIPANRGEIKGSESATYVPVAPPTPAWQPEIKPEPAWHDQDETSSVKSDGAGGARASFRGRGRGRGRGRGRGRGGTRTHFDYQFGYRKFDGVEGPRTPKYMNNITYYFDNVSSTELYSVDQELLKDYIKRQIEYYFSVDNLERDFFLRRKMDADGFLPITLIASFHRVQALTTDISLIFAALKDSKVVEIVDEKVRRREEPEKWPLPPIVDYSQTDFSQLLNCPEFVPRQHYQKETESAPGSPRAVTPVPTKTEEVSNLKTLPKGLSASLPDLDSENWIEVKKRPRPSPARPKKSEESRFSHLTSLPQQLPSQQLMSKDQDEQEELDFLFDEEMEQMDGRKNTFTAWSDEESDYEIDDRDVNKILIVTQTPHYMRRHPGGDRTGNHTSRAKMSAELAKVINDGLFYYEQDLWAEKFEPEYSQIKQEVENFKKVNMISREQFDTLTPEPPVDPNQEVPPGPPRFQQVPTDALANKLFGAPEPSTIARSLPTTVPESPNYRNTRTPRTPRTPQLKDSSQTSRFYPVVKEGRTLDAKMPRKRKTRHSSNPPLESHVGWVMDSREHRPRTASISSSPSEGTPTVGSYGCTPQSLPKFQHPSHELLKENGFTQHVYHKYRRRCLNERKRLGIGQSQEMNTLFRFWSFFLRDHFNKKMYEEFKQLALEDAKEGYRYGLECLFRYYSYGLEKKFRLDIFKDFQEETVKDYEAGQLYGLEKFWAFLKYSKAKNLDIDPKLQEYLGKFRRLEDFRVDPPMGEEGNHKRHSVVAGGGGGEGRKRCPSQSSSRPAAMISQPPTPPTGQPVREDAKWTSQHSNTQTLGK

SEQ ID NO: 16 - protein, 688 aa, Homo sapiens
MSVNSEKSSSSERPEPQQKAPLVPPPPPPPPPPPPPLPDPTPPEPEEEILGSDDEEQEDPADYCKGGYHPVKIGDLFNGRYHVIRKLGWGHFSTVWLCWDMQGKRFVAMKVVKSAQHYTETALDEIKLLKCVRESDPSDPNKDMVVQLIDDFKISGMNGIHVCMVFEVLGHHLLKWIIKSNYQGLPVRCVKSIIRQVLQGLDYLHSKCKIIHTDIKPENILMCVDDAYVRRMAAEATEWQKAGAPPPSGSAVSTAPQQKPIGKISKNKKKKLKKKQKRQAELLEKRLQEIEELEREAERKIIEENITSAAPSNDQDGEYCPEVKLKTTGLEEAAEAETAKDNGEAEDQEEKEDAEKENIEKDEDDVDQELANIDPTWIESPKTNGHIENGPFSLEQQLDDEDDDEEDCPNPEEYNLDEPNAESDYTYSSSYEQFNGELPNGRHKIPESQFPEFSTSLFSGSLEPVACGSVLSEGSPLTEQEESSPSHDRSRTVSASSTGDLPKAKTRAADLLVNPLDPRNADKIRVKIADLGNACWVHKHFTEDIQTRQYRSIEVLIGAGYSTPADIWSTACMAFELATGDYLFEPHSGEDYSRDEDHIAHIIELLGSIPRHFALSGKYSREFFNRRGELRHITKLKPWSLFDVLVEKYGWPHEDAAQFTDFLIPMLEMVPEKRASAGECLRHPWLNS

SEQ ID NO: 17 - protein, 699 aa, Homo sapiens
MSSRKVLAIQARKRRPKREKHPKKPEPQQKAPLVPPPPPPPPPPPPPLPDPTPPEPEEEILGSDDEEQEDPADYCKGGYHPVKIGDLFNGRYHVIRKLGWGHFSTVWLCWDMQGKRFVAMKVVKSAQHYTETALDEIKLLKCVRESDPSDPNKDMVVQLIDDFKISGMNGIHVCMVFEVLGHHLLKWIIKSNYQGLPVRCVKSIIRQVLQGLDYLHSKCKIIHTDIKPENILMCVDDAYVRRMAAEATEWQKAGAPPPSGSAVSTAPQQKPIGKISKNKKKKLKKKQKRQAELLEKRLQEIEELEREAERKIIEENITSAAPSNDQDGEYCPEVKLKTTGLEEAAEAETAKDNGEAEDQEEKEDAEKENIEKDEDDVDQELANIDPTWIESPKTNGHIENGPFSLEQQLDDEDDDEEDCPNPEEYNLDEPNAESDYTYSSSYEQFNGELPNGRHKIPESQFPEFSTSLFSGSLEPVACGSVLSEGSPLTEQEESSPSHDRSRTVSASSTGDLPKAKTRAADLLVNPLDPRNADKIRVKIADLGNACWVHKHFTEDIQTRQYRSIEVLIGAGYSTPADIWSTACMAFELATGDYLFEPHSGEDYSRDEDHIAHIIELLGSIPRHFALSGKYSREFFNRRGELRHITKLKPWSLFDVLVEKYGWPHEDAAQFTDFLIPMLEMVPEKRASAGECLRHPWLNS

SEQ ID NO: 18 - protein, 1481 aa, Homo sapiens
MPNSERHGGKKDGSGGASGTLQPSSGGGSSNSRERHRLVSKHKRHKSKHSKDMGLVTPEAASLGTVIKPLVEYDDISSDSDTFSDDMAFKLDRRENDERRGSDRSDRLHKHRHHQHRRSRDLLKAKQTEKEKSQEVSSKSGSMKDRISGSSKRSNEETDDYGKAQVAKSSSKESRSSKLHKEKTRKERELKSGHKDRSKSHRKRETPKSYKTVDSPKRRSRSPHRKWSDSSKQDDSPSGASYGQDYDLSPSRSHTSSNYDSYKKSPGSTSRRQSVSPPYKEPSAYQSSTRSPSPYSRRQRSVSPYSRRRSSSYERSGSYSGRSPSPYGRRRSSSPFLSKRSLSRSPLPSRKSMKSRSRSPAYSRHSSSHSKKKRSSSRSRHSSISPVRLPLNSSLGAELSRKKKERAAAAAAAKMDGKESKGSPVFLPRKENSSVEAKDSGLESKKLPRSVKLEKSAPDTELVNVTHLNTEVKNSSDTGKVKLDENSEKHLVKDLKAQGTRDSKPIALKEEIVTPKETETSEKETPPPLPTIASPPPPLPTTTPPPQTPPLPPLPPIPALPQQPPLPPSQPAFSQVPASSTSTLPPSTHSKTSAVSSQANSQPPVQVSVKTQVSVTAAIPHLKTSTLPPLPLPPLLPGDDDMDSPKETLPSKPVKKEKEQRTRHLLTDLPLPPELPGGDLSPPDSPEPKAITPPQQPYKKRPKICCPRYGERRQTESDWGKRCVDKFDIIGIIGEGTYGQVYKAKDKDTGELVALKKVRLDNEKEGFPITAIREIKILRQLIHRSVVNMKEIVTDKQDALDFKKDKGAFYLVFEYMDHDLMGLLESGLVHFSEDHIKSFMKQLMEGLEYCHKKNFLHRDIKCSNILLNNSGQIKLADFGLARLYNSEESRPYTNKVITLWYRPPELLLGEERYTPAIDVWSCGCILGELFTKKPIFQANLELAQLELISRLCGSPCPAVWPDVIKLPYFNTMKPKKQYRRRLREEFSFIPSAALDLLDHMLTLDPSKRCTAEQTLQSDFLKDVELSKMAPPDLPHWQDCHELWSKKRRRQRQSGVVVEEPPPSKTSRKETTSGTSTEPVKNSSPAPPQPAPGKVESGAGDAIGLADITQQLNQSELAVLLNLLQSQTDLSIPQMAQLLNIHSNPEMQQQLEALNQSISALTEATSQQQDSETMAPEESLKEAPSAPVILPSAEQTTLEASSTPADMQNILAVLLSQLMKTQEPAGSLEENNSDKNSGPQGPRRTPTMPQEEAAEKRPPEPPGPPPPPPPPPLVEGDLSSAPQELNPAVTAALLQLLSQPEAEPPGHLPHEHQALRPMEYSTRPRPNRTYGNTDGPETGFSAIDTDERNSGPALTESLVQTLVKNRTFSGSLSHLGESSSYQGTGSVQFPGDQDLRFARVPLALHPVVGQPFLKAEGSSNSVVHAETKLQNYGELGPGTTGASSSGAGLHWGGPTQSSAYGKLYRGPTRVPPRGGRGRGVPY

SEQ ID NO: 19 - protein, 1490 aa, Homo sapiens
MPNSERHGGKKDGSGGASGTLQPSSGGGSSNSRERHRLVSKHKRHKSKHSKDMGLVTPEAASLGTVIKPLVEYDDISSDSDTFSDDMAFKLDRRENDERRGSDRSDRLHKHRHHQHRRSRDLLKAKQTEKEKSQEVSSKSGSMKDRISGSSKRSNEETDDYGKAQVAKSSSKESRSSKLHKEKTRKERELKSGHKDRSKSHRKRETPKSYKTVDSPKRRSRSPHRKWSDSSKQDDSPSGASYGQDYDLSPSRSHTSSNYDSYKKSPGSTSRRQSVSPPYKEPSAYQSSTRSPSPYSRRQRSVSPYSRRRSSSYERSGSYSGRSPSPYGRRRSSSPFLSKRSLSRSPLPSRKSMKSRSRSPAYSRHSSSHSKKKRSSSRSRHSSISPVRLPLNSSLGAELSRKKKERAAAAAAAKMDGKESKGSPVFLPRKENSSVEAKDSGLESKKLPRSVKLEKSAPDTELVNVTHLNTEVKNSSDTGKVKLDENSEKHLVKDLKAQGTRDSKPIALKEEIVTPKETETSEKETPPPLPTIASPPPPLPTTTPPPQTPPLPPLPPIPALPQQPPLPPSQPAFSQVPASSTSTLPPSTHSKTSAVSSQANSQPPVQVSVKTQVSVTAAIPHLKTSTLPPLPLPPLLPGDDDMDSPKETLPSKPVKKEKEQRTRHLLTDLPLPPELPGGDLSPPDSPEPKAITPPQQPYKKRPKICCPRYGERRQTESDWGKRCVDKFDIIGIIGEGTYGQVYKAKDKDTGELVALKKVRLDNEKEGFPITAIREIKILRQLIHRSVVNMKEIVTDKQDALDFKKDKGAFYLVFEYMDHDLMGLLESGLVHFSEDHIKSFMKQLMEGLEYCHKKNFLHRDIKCSNILLNNSGQIKLADFGLARLYNSEESRPYTNKVITLWYRPPELLLGEERYTPAIDVWSCGCILGELFTKKPIFQANLELAQLELISRLCGSPCPAVWPDVIKLPYFNTMKPKKQYRRRLREEFSFIPSAALDLLDHMLTLDPSKRCTAEQTLQSDFLKDVELSKMAPPDLPHWQDCHELWSKKRRRQRQSGVVVEEPPPSKTSRKETTSGTSTEPVKNSSPAPPQPAPGKVESGAGDAIGLADITQQLNQSELAVLLNLLQSQTDLSIPQMAQLLNIHSNPEMQQQLEALNQSISALTEATSQQQDSETMAPEESLKEAPSAPVILPSAEQTTLEASSTPADMQNILAVLLSQLMKTQEPAGSLEENNSDKNSGPQGPRRTPTMPQEEAAACPPHILPPEKRPPEPPGPPPPPPPPPLVEGDLSSAPQELNPAVTAALLQLLSQPEAEPPGHLPHEHQALRPMEYSTRPRPNRTYGNTDGPETGFSAIDTDERNSGPALTESLVQTLVKNRTFSGSLSHLGESSSYQGTGSVQFPGDQDLRFARVPLALHPVVGQPFLKAEGSSNSVVHAETKLQNYGELGPGTTGASSSGAGLHWGGPTQSSAYGKLYRGPTRVPPRGGRGRGVPY

SEQ ID NO: 20 - protein, 1006 aa, Homo sapiens
MSNSRNNRVMVEGVGARVVRGPDWKWGKQDGGEGHVGTVRSFESPEEVVVVWDNGTAANYRCSGAYDLRILDSAPTGIKHDGTMCDTCRQQPIIGIRWKCAECTNYDLCTVCYHGDKHHLRHRFYRITTPGSERVLLESRRKSKKITARGIFAGARVVRGVDWQWEDQDGGNGRRGKVTEIQDWSASSPHSAAYVLWDNGAKNLYRVGFEGMSDLKCVQDAKGGSFYRDHCPVLGEQNGNRNPGGLQIGDLVNIDLDLEIVQSLQHGHGGWTDGMFETLTTTGTVCGIDEDHDIVVQYPSGNRWTFNPAVLTKANIVRSGDAAQGAEGGTSQFQVGDLVQVCYDLERIKLLQRGHGEWAEAMLPTLGKVGRVQQIYSDSDLKVEVCGTSWTYNPAAVSKVASAGSAISNASGERLSQLLKKLFETQESGDLNEELVKAAANGDVAKVEDLLKRPDVDVNGQCAGHTAMQAASQNGHVDILKLLLKQNVDVEAEDKDGDRAVHHAAFGDEGAVIEVLHRGSADLNARNKRRQTPLHIAVNKGHLQVVKTLLDFGCHPSLQDSEGDTPLHDAISKKRDDILAVLLEAGADVTITNNNGFNALHHAALRGNPSAMRVLLSKLPRPWIVDEKKDDGYTALHLAALNNHVEVAELLVHQGNANLDIQNVNQQTALHLAVERQHTQIVRLLVRAGAKLDIQDKDGDTPLHEALRHHTLSQLRQLQDMQDVGKVDAAWEPSKNTLIMGLGTQGAEKKSAASIACFLAANGADLSIRNKKGQSPLDLCPDPNLCKALAKCHKEKVSGQVGSRSPSMISNDSETLEECMVCSDMKRDTLFGPCGHIATCSLCSPRVKKCLICKEQVQSRTKIEECVVCSDKKAAVLFQPCGHMCACENCANLMKKCVQCRAVVERRVPFIMCCGGKSSEDATDDISSGNIPVLQKDKDNTNVNADVQKLQQQLQDIKEQTMCPVCLDRLKNMIFLCGHGTCQLCGDRMSECPICRKAIERRILLY

SEQ ID NO: 21 - protein, 1353 aa, Homo sapiens
MSSPMPDCTSKCRSLKHALDVLSVVTKGSENQIKAFLSSHCYNAATIKDVFGRNALHLVSSCGKKGVLDWLIQKGVDLLVKDKESGWTALHRSIFYGHIDCVWSLLKHGVSLYIQDKEGLSALDLVMKDRPTHVVFKNTDPTDVYTWGDNTNFTLGHGSQNSKHHPELVDLFSRSGIYIKQVVLCKFHSVFLSQKGQVYTCGHGPGGRLGHGDEQTCLVPRLVEGLNGHNCSQVAAAKDHTVVLTEDGCVYTFGLNIFHQLGIIPPPSSCNVPRQIQAKYLKGRTIIGVAAGRFHTVLWTREAVYTMGLNGGQLGCLLDPNGEKCVTAPRQVSALHHKDIALSLVAASDGATVCVTTRGDIYLLADYQCKKMASKQLNLKKVLVSGGHMEYKVDPEHLKENGGQKICILAMDGAGRVFCWRSVNSSLKQCRWAYPRQVFISDIALNRNEILFVTQDGEGFRGRWFEEKRKSSEKKEILSNLHNSSSDVSYVSDINSVYERIRLEKLTFAHRAVSVSTDPSGCNFAILQSDPKTSLYEIPAVSSSSFFEEFGKLLREADEMDSIHDVTFQVGNRLFPAHKYILAVHSDFFQKLFLSDGNTSEFTDIYQKDEDSAGCHLFVVEKVHPDMFEYLLQFIYTDTCDFLTHGFKPRIHLNKNPEEYQGTLNSHLNKVNFHEDDNQKSAFEVYKSNQAQTVSERQKSKPKSCKKGKNIREDDPVRMLQTVAKKFDFSNLSSRLDGVRFENEKINVIAKNTGNKLKLSQKKCSFLCDVTMKSVDGKEFPCHKCVLCARLEYFHSMLSSSWIEASSCAALEMPIHSDILKVILDYLYTDEAVVIKESQNVDFICSVLVVADQLLITRLKEICEVALTEKLTLKNAAMLLEFAAMYSAKQLKLSCLQFIGLNMAALLEARSLDVLSDGVLKDLSEFYRKMIPAMDRRVITPYQDGPDISYLEVEDGDIFLKEEINMEQNHSETMFKKAKTKAKKKPRKRSDSSGGYNLSDIIQSPSSTGLLKSGKTNSVESLPELLTSDSEGSYAGVGSPRDLQSPDFTTGFHSDKIEAKVKPYVNGTSPVYSREDLKPWEKSPILKISAPQPIPSNRIDTTSSASWVAGSFSPVSPPVVDLRTIMEIEESRQKCGATPKSHLGKTVSHGVKLSQKQRKMIALTTKENNSGMNSMETVLFTPSKAPKPVNAWASSLHSVSSKSFRDFLLEEKKSVTSHSSGDHVKKVSFKGIENSQAPKIVRCSTHGTPGPEGNHISDLPLLDSPNPWLSSSVTAPSMVAPVTFASIVEEELQQEAALIRSREKPLALIQIEEHAIQDLLVFYEAFGNPEEFVIVERTPQGPLAVPMWNKHGC

SEQ ID NO: 22 - protein, 7 aa, Mus musculus
RERLGSF

SEQ ID NO: 23 - protein, 7 aa, Mus musculus
RRRAPSV

SEQ ID NO: 24 - protein, 21 aa, Mus musculus
MNILSSQSPLHPSTLNAVIHR

SEQ ID NO: 25 - DNA, 22 bp, Mus musculus
acccagatcatgtttgagacct

SEQ ID NO: 26 - DNA, 22 bp, Mus musculus
gcagtaatctccttctgcatcc

SEQ ID NO: 27 - protein, 21 aa, Mus musculus
MNILSSQSPLHPSTLNAVIHR

SEQ ID NO: 28 - protein, 21 aa, Mus musculus
MNILSSQSPLHPSTLNAVIHR

SEQ ID NO: 29 - protein, 21 aa, Mus musculus
MNILGSQSPLHPSTLSTVIHR

SEQ ID NO: 30 - protein, 38 aa, Mus musculus
KDGEGPDNLEPACPLSLPLQGNHTAADMYLSPLRSPKK

SEQ ID NO: 31 - protein, 18 aa, Mus musculus
RTGSESSQTGASATSGRN

SEQ ID NO: 32 - protein, 29 aa, Mus musculus
RTASISSSPSEGTPAVGSYGCTPQSLPKF

SEQ ID NO: 33 - protein, 29 aa, Mus musculus
RTASISSSPSEGTPAVGSYGCTPQSLPKF

SEQ ID NO: 34 - protein, 29 aa, Mus musculus
RTASISSSPSEGTPAVGSYGCTPQSLPKF

SEQ ID NO: 35 - protein, 20 aa, Mus musculus
RAESPETSAVESTQSTPQKG

SEQ ID NO: 36 - protein, 24 aa, Mus musculus
KTSDIFGSPVTATAPLAHPNKPKD

SEQ ID NO: 37 - protein, 8 aa, Mus musculus
RRLSSLRA

SEQ ID NO: 38 - protein, 15 aa, Mus musculus
RRSSSELSPEVVEKV

SEQ ID NO: 39 - protein, 24 aa, Mus musculus
RSSSGSEHSTEGSVSLGDGPLSRS

SEQ ID NO: 40 - protein, 24 aa, Mus musculus
RSSSGSEHSTEGSVSLGDGPLSRS

SEQ ID NO: 41 - protein, 15 aa, Mus musculus
RRSSSELSPEVVEKV

SEQ ID NO: 42 - protein, 15 aa, Mus musculus
RTTPLASPSLSPGRS

SEQ ID NO: 43 - protein, 19 aa, Mus musculus
RTHSTSSSIGSGESPFSRS

SEQ ID NO: 44 - protein, 19 aa, Mus musculus
RTHSTSSSIGSGESPFSRS

SEQ ID NO: 45 - protein, 19 aa, Mus musculus
RTHSTSSSIGSGESPFSRS

SEQ ID NO: 46 - protein, 19 aa, Mus musculus
RTHSTSSSIGSGESPFSRS

SEQ ID NO: 47 - protein, 19 aa, Mus musculus
RTHSTSSSIGSGESPFSRS

SEQ ID NO: 48 - protein, 19 aa, Mus musculus
RTHSTSSSIGSGESPFSRS

SEQ ID NO: 49 - protein, 19 aa, Mus musculus
RTHSTSSSIGSGESPFSRS

SEQ ID NO: 50 - protein, 19 aa, Mus musculus
RTHSTSSSIGSGESPFSRS

SEQ ID NO: 51 - protein, 19 aa, Mus musculus
RTHSTSSSIGSGESPFSRS

SEQ ID NO: 52 - protein, 16 aa, Mus musculus
RERQESESEQELVNKR

SEQ ID NO: 53 - protein, 19 aa, Mus musculus
RTSPAGGTWSSVVSGVPRL

SEQ ID NO: 54 - protein, 24 aa, Mus musculus
RSKFDSDEEDEDAENLEAVSSGKV

SEQ ID NO: 55 - protein, 25 aa, Mus musculus
KDTVIIVSEPSEDEESHDLPSVTRR

SEQ ID NO: 56 - protein, 22 aa, Mus musculus
KGTSRPGTPSAEAASTSSTLRA

SEQ ID NO: 57 - protein, 30 aa, Mus musculus
RGCSPPKSPEKPPQSTSSESCPPSPQPTKV

SEQ ID NO: 58 - protein, 25 aa, Mus musculus
RVMTIPYQPMPASSPVICAGGQDRC

SEQ ID NO: 59 - protein, 23 aa, Mus musculus
RLSTTPSPTNSLHEDGVDDFRRQ

SEQ ID NO: 60 - protein, 37 aa, Mus musculus
KSQPHSSTSNQETSDSEMEMEAEHYPNGVLESVSTRI

SEQ ID NO: 61 - protein, 29 aa, Mus musculus
RSAPASPNHAGVLSAHSSGAQTPESLSRE

SEQ ID NO: 62 - protein, 20 aa, Mus musculus
RSRDATPPVSPINMEDQERI

SEQ ID NO: 63 - protein, 26 aa, Mus musculus
KTTEAPCSPGSQQPPSPDELPANVKQ

SEQ ID NO: 64 - protein, 30 aa, Mus musculus; identical to SEQ ID NO: 57

SEQ ID NO: 65 - protein, 22 aa, Mus musculus
KGTSRPGTPSAEAASTSSTLRA

SEQ ID NO: 66 - protein, 34 aa, Mus musculus
KSVSETSEDKKDEESDEEEEEEEEEEPLGATTRS

SEQ ID NO: 67 - protein, 22 aa, Mus musculus
KGTSRPGTPSAEAASTSSTLRA

SEQ ID NO: 68 - protein, 22 aa, Mus musculus
KGTSRPGTPSAEAASTSSTLRA

SEQ ID NO: 69 - protein, 29 aa, Mus musculus
RTASISSSPSEGTPAVGSYGCTPQSLPKF

SEQ ID NO: 70 - protein, 29 aa, Mus musculus
RTASISSSPSEGTPAVGSYGCTPQSLPKF

SEQ ID NO: 71 - protein, 11 aa, Mus musculus
RRSESPFEGKN

SEQ ID NO: 72 - protein, 28 aa, Mus musculus
KGLNLDGTPALSTLGGFSPASKPSSPRE

SEQ ID NO: 73 - protein, 28 aa, Mus musculus
KGLNLDGTPALSTLGGFSPASKPSSPRE

SEQ ID NO: 74 - protein, 28 aa, Mus musculus
KGLNLDGTPALSTLGGFSPASKPSSPRE

SEQ ID NO: 75 - protein, 28 aa, Mus musculus
KGLNLDGTPALSTLGGFSPASKPSSPRE

SEQ ID NO: 76 - protein, 36 aa, Mus musculus
RTASEGDGGAAGGAGTAGGRPMSVAGSPLSPGPVRA

SEQ ID NO: 77 - protein, 28 aa, Mus musculus
KGLNLDGTPALSTLGGFSPASKPSSPRE

SEQ ID NO: 78 - protein, 28 aa, Mus musculus
KGLNLDGTPALSTLGGFSPASKPSSPRE

SEQ ID NO: 79 - protein, 26 aa, Mus musculus
RSLVSPIPSPTGTISVPNSCPASPRG

SEQ ID NO: 80 - protein, 26 aa, Mus musculus
RSLVSPIPSPTGTISVPNSCPASPRG

SEQ ID NO: 81 - protein, 26 aa, Mus musculus
KTTEAPCSPGSQQPPSPDELPANVKQ

SEQ ID NO: 82 - protein, 34 aa, Mus musculus; identical to SEQ ID NO: 66

SEQ ID NO: 83 - protein, 34 aa, Mus musculus; identical to SEQ ID NO: 66

SEQ ID NO: 84 - protein, 24 aa, Mus musculus
RSYQNSPSSEDGIRPLPEYSTEKH

SEQ ID NO: 85 - protein, 30 aa, Mus musculus; identical to SEQ ID NO: 57

SEQ ID NO: 86 - protein, 44 aa, Mus musculus
RNSPVAKTPPKDLPAIPGVTSPTSDEPPMQASQSQLPSSPEDKR

SEQ ID NO: 87 - protein, 27 aa, Mus musculus
RSLMSSPEDLTKDFEELKAEEIDVAKD

SEQ ID NO: 88 - protein, 17 aa, Mus musculus
RSSEVVLSGDDEDYQRI

SEQ ID NO: 89 - protein, 25 aa, Mus musculus
RATSRPINLGPSSPNTEIHWTPYRA

SEQ ID NO: 90 - protein, 25 aa, Mus musculus
RATSRPINLGPSSPNTEIHWTPYRA

SEQ ID NO: 91 - protein, 20 aa, Mus musculus
RTISAQDTLAYATALLNEKE

SEQ ID NO: 92 - protein, 26 aa, Mus musculus
RLHYTPPLQSPITDGDPLLGQSPWRS

SEQ ID NO: 93 - protein, 14 aa, Mus musculus
RSTSPIIGSPPVRA

SEQ ID NO: 94 - protein, 21 aa, Mus musculus
RCSPVPGLSSSPSGSPLHGKL

SEQ ID NO: 95 - protein, 28 aa, Mus musculus
RLGEQGPEPGPTPPQTPTPPSTPPLAKQ

SEQ ID NO: 96 - protein, 15 aa, Mus musculus
RRSTSPIIGSPPVRA

SEQ ID NO: 97 - protein, 15 aa, Mus musculus
RRSTSPIIGSPPVRA

SEQ ID NO: 98 - protein, 14 aa, Mus musculus
RSTSPIIGSPPVRA

SEQ ID NO: 99 - protein, 36 aa, Mus musculus
KSQEDEEEISTSPGVSEFVSDAFDTCSLNQEDLRKE

SEQ ID NO: 100 - protein, 36 aa, Mus musculus; identical to SEQ ID NO: 99

SEQ ID NO: 101 - protein, 26 aa, Mus musculus
RSLVSPIPSPTGTISVPNSCPASPRG

SEQ ID NO: 102 - protein, 25 aa, Mus musculus
RRVSTDLPEGQDVYTAACNSVIHRC

SEQ ID NO: 103 - protein, 17 aa, Mus musculus
KDWDKESEGEEPAGGRA

SEQ ID NO: 104 - protein, 21 aa, Mus musculus
RRDSSDDWEIPDGQITVGQRI

SEQ ID NO: 105 - protein, 33 aa, Mus musculus
RVALGDGVQLPPGDYSTTPGGTLFSTTPGGTRI

SEQ ID NO: 106 - protein, 19 aa, Mus musculus
RASDDLGEPDVFATAPFRS

SEQ ID NO: 107 - protein, 33 aa, Mus musculus; identical to SEQ ID NO: 105

SEQ ID NO: 108 - protein, 33 aa, Mus musculus; identical to SEQ ID NO: 105

SEQ ID NO: 109 - protein, 33 aa, Mus musculus; identical to SEQ ID NO: 105

SEQ ID NO: 110 - protein, 18 aa, Mus musculus
RSMDVDLNQAHMEDTPKK

SEQ ID NO: 111 - protein, 39 aa, Mus musculus
KIWDPTPSHTPAGAATPGRGDTPGHATPGHGGATSSARK

SEQ ID NO: 112 - protein, 16 aa, Mus musculus
RTASGSSVTSLEGTRS

SEQ ID NO: 113 - protein, 34 aa, Mus musculus
RRVALGDGVQLPPGDYSTTPGGTLFSTTPGGTRI

SEQ ID NO: 114 - protein, 18 aa, Mus musculus
RISSKSPGHMVILNQTKG

SEQ ID NO: 115 - protein, 21 aa, Mus musculus
RDFTKPQDGDIIAPLITPLKW

SEQ ID NO: 116 - protein, 17 aa, Mus musculus
RTASEGSEAETPEAPKQ

SEQ ID NO: 117 - protein, 11 aa, Mus musculus
RLGSFGSITRQ

SEQ ID NO: 118 - protein, 17 aa, Mus musculus
RSLSFSEPQQPPPTVKS

SEQ ID NO: 119 - protein, 46 aa, Mus musculus
KIHTTALTGQSPPLASGHQGEGDAPSVEPGATNIQQPSSPAPSTKQ

SEQ ID NO: 120 - protein, 46 aa, Mus musculus; identical to SEQ ID NO: 119

SEQ ID NO: 121 - protein, 46 aa, Mus musculus; identical to SEQ ID NO: 119

SEQ ID NO: 122 - protein, 19 aa, Mus musculus
RMSSHTETSSFLQTLTGRL

SEQ ID NO: 123 - protein, 29 aa, Mus musculus
RDGSGTPSRHSLSGSSPGMKDTPQTPSRG

SEQ ID NO: 124 - protein, 26 aa, Mus musculus
RDRSSSAPNVHINTIEPVNIDDLIRD

SEQ ID NO: 125 - protein, 35 aa, Mus musculus
RRGNNSAVGSNADLTIEEDEEEEPVALQQAQQVRY

SEQ ID NO: 126 - protein, 35 aa, Mus musculus; identical to SEQ ID NO: 125

SEQ ID NO: 127 - protein, 19 aa, Mus musculus
RSLSSPTVTLSAPLEGAKD

SEQ ID NO: 128 - protein, 12 aa, Mus musculus
RRPPSPDPNTKV

SEQ ID NO: 129 - protein, 23 aa, Mus musculus
KAKQPVIGDQNSDSDEMLAVLKE

SEQ ID NO: 130 - protein, 15 aa, Mus musculus
RSLPTTVPESPNYRN

SEQ ID NO: 131 - protein, 23 aa, Mus musculus
RTTSFAESCKPVQQPSAFGSMKV

SEQ ID NO: 132 - protein, 11 aa, Mus musculus
RLSSLRASTSK

SEQ ID NO: 133 - protein, 16 aa, Mus musculus
LSSLRASTSKSESSQK

SEQ ID NO: 134 - protein, 12 aa, Mus musculus
SLPVSVPVWAFK

SEQ ID NO: 135 - protein, 21 aa, Mus musculus
TTSFAESCKPVQQPSAFGSMK

SEQ ID NO: 136 - protein, 30 aa, Mus musculus
RNSPMAQTPPCHLPNIPGVTSPGALIEDSK

SEQ ID NO: 137 - protein, 37 aa, Mus musculus
TVAISDAAQLPQDYCTTPGGTLFSTTPGGTRIIYDRK

SEQ ID NO: 138 - protein, 18 aa, Mus musculus
SRTGSESSQTGASATSGR

SEQ ID NO: 139 - protein, 16 aa, Mus musculus
TGSESSQTGASATSGR

SEQ ID NO: 140 - protein, 42 aa, Mus musculus
NSPVAKTPPKDLPAIPGVTSPTSDEPPMQASQSQLPSSPEDK

SEQ ID NO: 141 - protein, 9 aa, Mus musculus
SFSKEVEER

SEQ ID NO: 142 - protein, 22 aa, Mus musculus
FIGSPRTPVSPVKFSPGDFWGR

SEQ ID NO: 143 - protein, 26 aa, Mus musculus
AGTTVPESIHSFIGDGLVKPEALNKK

SEQ ID NO: 144 - protein, 28 aa, Mus musculus
GGGASSPAPVVFTVGSPPSGATPPQSTR

SEQ ID NO: 145 - protein, 21 aa, Mus musculus
MNILSSQSPLHPSTLNAVIHR

SEQ ID NO: 146 - protein, 40 aa, Mus musculus
TASLPAIPNPFPELTGAAPGSPPSVAPSSLPPPPSQPPAK

SEQ ID NO: 147 - protein, 9 aa, Mus musculus
LGSFGSITR

SEQ ID NO: 148 - protein, 21 aa, Mus musculus
TTSFAESCKPVQQPSAFGSMK

SEQ ID NO: 149 - protein, 14 aa, Mus musculus
TASGSSVTSLEGTR

SEQ ID NO: 150 - protein, 24 aa, Mus musculus
DRSSSAPNVHINTIEPVNIDDLIR

SEQ ID NO: 151 - protein, 8 aa, Mus musculus
LNTSDFQK

SEQ ID NO: 152 - protein, 16 aa, Mus musculus
TGSESSQTGASATSGR

SEQ ID NO: 153 - protein, 31 aa, Mus musculus
VALGDGVQLPPGDYSTTPGGTLFSTTPGGTR

SEQ ID NO: 154 - protein, 29 aa, Mus musculus
NSPMAQTPPCHLPNIPGVTSPGALIEDSK

SEQ ID NO: 155 - protein, 10 aa, Mus musculus
LDGNPINLSR

SEQ ID NO: 156 - protein, 16 aa, Mus musculus
LSSLRASTSKSESSQK

SEQ ID NO: 157 - protein, 11 aa, Mus musculus
RLSSLRASTSK

SEQ ID NO: 158 - protein, 29 aa, Mus musculus
TPQAPTPANLVVGPRSAHGTAPVNIAGSR

SEQ ID NO: 159 - protein, 25 aa, Mus musculus
VTEGSYSCLAHSPLGVVASQVAVVK

SEQ ID NO: 160 - protein, 16 aa, Mus musculus
MPATDTANLTAPWHPR

SEQ ID NO: 161 - protein, 13 aa, Mus musculus
NASTSFQELEDKK

SEQ ID NO: 162 - protein, 27 aa, Mus musculus
WLKEAEEESSGGEEEDEDENIEVVYSK

SEQ ID NO: 163 - protein, 32 aa, Mus musculus
RVALGDGVQLPPGDYSTTPGGTLFSTTPGGTR

SEQ ID NO: 164 - protein, 28 aa, Mus musculus
SAHGTAPVNIAGSRTPAGLAPTNLSSSR

SEQ ID NO: 165 - protein, 11 aa, Mus musculus
GYSYDDSMESR

SEQ ID NO: 166 - protein, 11 aa, Mus musculus
GYSYDDSMESR

SEQ ID NO: 167 - protein, 9 aa, Mus musculus
SDISPLTPR

SEQ ID NO: 168 - protein, 31 aa, Mus musculus
AATATRPPGPPPAPQPPSPAPSPPPRPALAR

SEQ ID NO: 169 - protein, 8 aa, Mus musculus
GFGDSFGR

SEQ ID NO: 170 - protein, 35 aa, Mus musculus
QADVADQQTTELPAENGETENQSPASEEEKEAKSD

SEQ ID NO: 171 - protein, 30 aa, Mus musculus; identical to SEQ ID NO: 136

SEQ ID NO: 172 - protein, 8 aa, Mus musculus
GFGDSFGR

SEQ ID NO: 173 - protein, 36 aa, Mus musculus
SYSESGLMGEPQPQGPPSWTDECLSSQDEEHEADKK

SEQ ID NO: 174 - protein, 34 aa, Mus musculus
KEDSDEDEDEEDEDDSDEDEDDEEEDEFEPPIVK

SEQ ID NO: 175 - protein, 39 aa, Mus musculus
VFTSDISDPVVASTSQAPGMNLSHSASSLSLQQAFSELK

SEQ ID NO: 176 - protein, 15 aa, Mus musculus
VSSETHQGPGTPESK

SEQ ID NO: 177 - protein, 15 aa, Mus musculus
TPPSAPSQSRMTSER

SEQ ID NO: 178 - protein, 15 aa, Mus musculus
VSSETHQGPGTPESK

SEQ ID NO: 179 - protein, 39 aa, Mus musculus
SSSPTNSLTQPIEMPTLSSSPTEERPTVGPGQQDNPLLK

SEQ ID NO: 180 - protein, 8 aa, Mus musculus
RKETPSPR

SEQ ID NO: 181 - protein, 16 aa, Mus musculus
TPVSPVKFSPGDFWGR

SEQ ID NO: 182 - protein, 32 aa, Mus musculus; identical to SEQ ID NO: 163

SEQ ID NO: 183 - protein, 29 aa, Mus musculus
DSQDTSAEQSDHDDEVASLASASGGFGSK

SEQ ID NO: 184 - protein, 8 aa, Mus musculus
DAMNLSGR

SEQ ID NO: 185 - protein, 31 aa, Mus musculus
LHQLAMQQSHFPMTHGNTGFSGIESSSPEVK

SEQ ID NO: 186 - protein, 18 aa, Mus musculus
SNSLSEQLTVNSNPDTVK

SEQ ID NO: 187 - protein, 8 aa, Mus musculus
SEGLSLER

SEQ ID NO: 188 - protein, 8 aa, Mus musculus
SEGLSLER

SEQ ID NO: 189 - protein, 29 aa, Mus musculus
TTQSLQDFPVADSEEEAEEEFQKELSQWR

SEQ ID NO: 190 - protein, 22 aa, Mus musculus
TESASLSQSQVNGFFASHLGDR

SEQ ID NO: 191 - protein, 31 aa, Mus musculus; identical to SEQ ID NO: 153

SEQ ID NO: 192 - protein, 34 aa, Mus musculus
SQEDEEEISTSPGVSEFVSDAFDTCSLNQEDLRK

SEQ ID NO: 193 - protein, 8 aa, Mus musculus
SEGLSLER

SEQ ID NO: 194 - protein, 24 aa, Mus musculus
TPEMIIQKPKISMQDVDLSLGSCK

SEQ ID NO: 195 - protein, 42 aa, Mus musculus
TSEFPTPLFSGPLEPVACGSVISEGSPLTEQEESSPSHDRSR

SEQ ID NO: 196 - protein, 21 aa, Mus musculus
MNILSSQSPLHPSTLNAVIHR

SEQ ID NO: 197 - protein, 21 aa, Mus musculus
MNILSSQSPLHPSTLNAVIHR

SEQ ID NO: 198 - protein, 26 aa, Mus musculus
SSGLQTPECLSREGSPIPHDPDLGSK

SEQ ID NO: 199 - protein, 13 aa, Mus musculus
SGEQITSSPVSPK

SEQ ID NO: 200 - protein, 23 aa, Mus musculus
LAWVGDVFTTTPTDPRPLTSPLR

SEQ ID NO: 201 - protein, 20 aa, Mus musculus
GTSRPGTPSAEAASTSSTLR

SEQ ID NO: 202 - protein, 8 aa, Mus musculus
LESLNIQR

SEQ ID NO: 203 - protein, 13 aa, Mus musculus
SASESYTQSFQSR

SEQ ID NO: 204 - protein, 10 aa, Mus musculus
SPTPKSPPSR

SEQ ID NO: 205 - protein, 25 aa, Mus musculus
AEALSSLHGDDQDSEDEVLTVPEVK

SEQ ID NO: 206 - protein, 13 aa, Mus musculus
SASESYTQSFQSR

SEQ ID NO: 207 - protein, 26 aa, Mus musculus
VLSPLRSPPLLGSESPYEDFLSADSK

SEQ ID NO: 208 - protein, 8 aa, Mus musculus
LESLNIQR

SEQ ID NO: 209 - protein, 11 aa, Mus musculus
CSVSLSNVEAR

SEQ ID NO: 210 - protein, 27 aa, Mus musculus
HSSGNSMLLPSMSVTMETSMIMSNIQR

SEQ ID NO: 211 - protein, 12 aa, Mus musculus
TVSASSTGDLPK

SEQ ID NO: 212 - protein, 12 aa, Mus musculus
SSPNPFVGSPPK

SEQ ID NO: 213 - protein, 11 aa, Mus musculus
CSVSLSNVEAR

SEQ ID NO: 214 - protein, 17 aa, Mus musculus
SVGDGETVEFDVVEGEK

SEQ ID NO: 215 - protein, 12 aa, Mus musculus
TVSASSTGDLPK

SEQ ID NO: 216 - protein, 19 aa, Mus musculus
DRSPSPLRGNVVPSPLPTR

SEQ ID NO: 217 - protein, 26 aa, Mus musculus
GSGSVDETLFALPAASEPVIPSSAEK

SEQ ID NO: 218 - protein, 40 aa, Mus musculus; identical to SEQ ID NO: 146

SEQ ID NO: 219 - protein, 42 aa, Mus musculus; identical to SEQ ID NO: 195

SEQ ID NO: 220 - protein, 25 aa, Mus musculus
SRSPVDSPVPASMFAPEPSSPGAAR

SEQ ID NO: 221 - protein, 28 aa, Mus musculus
TRTVLSLFDEDEDKVEDESSTCAPQDGR

SEQ ID NO: 222 - protein, 14 aa, Mus musculus
RVSGSATPNSEAPR

SEQ ID NO: 223 - protein, 25 aa, Mus musculus
KRSDSSGGYTLSDVIQSPPSAGLLK

SEQ ID NO: 224 - protein, 20 aa, Mus musculus
TSSTCSNESLNAGGTPVTPR

SEQ ID NO: 225 - protein, 27 aa, Mus musculus
RSPASSGSVAPQPSSPPSPAQAEPEPR

SEQ ID NO: 226 - protein, 17 aa, Mus musculus
THSTSSSIGSGESPFSR

SEQ ID NO: 227 - protein, 42 aa, Mus musculus; identical to SEQ ID NO: 195

SEQ ID NO: 228 - protein, 39 aa, Mus musculus
QNPEQSADEDAEKNEEDSEGSSDEDEDEDGVGNTTFLKK

SEQ ID NO: 229 - protein, 39 aa, Mus musculus
HSSFADTGAAPSALSPESPVLATSPEPWGPSLSASPESR

SEQ ID NO: 230 - protein, 17 aa, Mus musculus
THSTSSSIGSGESPFSR

SEQ ID NO: 231 - protein, 23 aa, Mus musculus
RSSRSFSLDEPPLFIPDNIATVK

SEQ ID NO: 232 - protein, 23 aa, Mus musculus
RSSRSFSLDEPPLFIPDNIATVK

SEQ ID NO: 233 - protein, 38 aa, Mus musculus
CGSGPVHISGQHLVAVEEDAESEDEDEEDVKLLGMSGK

SEQ ID NO: 234 - protein, 37 aa, Mus musculus
SLNFQEDDDTSRETFASDTNEALASLDEAQEGPGETK

SEQ ID NO: 235 - protein, 17 aa, Mus musculus
THSTSSSIGSGESPFSR

SEQ ID NO: 236 - protein, 17 aa, Mus musculus
THSTSSSIGSGESPFSR

SEQ ID NO: 237 - protein, 14 aa, Mus musculus
SRSDIDVNAAASAK

SEQ ID NO: 238 - protein, 29 aa, Mus musculus
STDSPVAGSEDDLVAAAPLLHSPEWSEER

SEQ ID NO: 239 - protein, 15 aa, Mus musculus
GFQFVSSSLPDICYR

SEQ ID NO: 240 - protein, 11 aa, Mus musculus
AMLDQLMGTSR

SEQ ID NO: 241 - protein, 20 aa, Mus musculus
GTSRPGTPSAEAASTSSTLR

SEQ ID NO: 242 - protein, 13 aa, Mus musculus
SQDDAMVDYFFQR

SEQ ID NO: 243 - protein, 15 aa, Mus musculus
LDLDLTSDSQPPVFK

SEQ ID NO: 244 - protein, 36 aa, Mus musculus
IRQPSIDLTDDDQTSSVPHSAISDIMSSDQETYSCK

SEQ ID NO: 245 - protein, 28 aa, Mus musculus
TRTVLSLFDEDEDKVEDESSTCAPQDGR

SEQ ID NO: 246 - protein, 21 aa, Mus musculus
YTPTSPSYSPSSPEYTPASPK

SEQ ID NO: 247 - protein, 33 aa, Mus musculus
SLLPNSSQDELMEVEKSEQPLSQVLPSLSPEHK

SEQ ID NO: 248 - protein, 12 aa, Mus musculus
SSPNPFVGSPPK

SEQ ID NO: 249 - protein, 13 aa, Mus musculus
RSTSPIIGSPPVR

SEQ ID NO: 250 - protein, 13 aa, Mus musculus
RSTSPIIGSPPVR

SEQ ID NO: 251 - protein, 35 aa, Mus musculus; identical to SEQ ID NO: 170

SEQ ID NO: 252 - protein, 24 aa, Mus musculus
SQTPQLHFLDTDDEISPTSWGDSR

SEQ ID NO: 253 - protein, 22 aa, Mus musculus
SSSGSEHSTEGSVSLGDGPLSR

SEQ ID NO: 254 - protein, 23 aa, Mus musculus
VHGLPTTSPSGVNMAELAQQVVK

SEQ ID NO: 255 - protein, 30 aa, Mus musculus
ATEEPSGTGSDELIKSDQVNGVLVLSLLDK

SEQ ID NO: 256 - protein, 10 aa, Mus musculus
AENIMASLER

SEQ ID NO: 257 - protein, 16 aa, Mus musculus
FDQLFDDESDPFEVLK

SEQ ID NO: 258 - protein, 16 aa, Mus musculus
FDQLFDDESDPFEVLK

SEQ ID NO: 259 - protein, 13 aa, Mus musculus
RSTSPIIGSPPVR

SEQ ID NO: 260 - protein, 18 aa, Mus musculus
KPAQETEETSSQESAEED

SEQ ID NO: 261 - protein, 13 aa, Mus musculus
SLPTTVPESPNYR

SEQ ID NO: 262 - protein, 29 aa, Mus musculus
TTQSLQDFPVADSEEEAEEEFQKELSQWR

SEQ ID NO: 263 - protein, 16 aa, Mus musculus
SSDEENGPPSSPDLDR

SEQ ID NO: 264 - protein, 15 aa, Mus musculus
SLSESYELSSDLQDK

SEQ ID NO: 265 - protein, 42 aa, Mus musculus; identical to SEQ ID NO: 140

SEQ ID NO: 266 - protein, 42 aa, Mus musculus; identical to SEQ ID NO: 140

SEQ ID NO: 267 - protein, 9 aa, Mus musculus
SFSKEVEER

SEQ ID NO: 268 - protein, 9 aa, Mus musculus
TYSLTTPAR

SEQ ID NO: 269 - protein, 9 aa, Mus musculus
TYSLTTPAR

SEQ ID NO: 270 - protein, 38 aa, Mus musculus
FSEMMDHMGGDEDVDLPEVDGADDDSQDSDDEKMPDLE

SEQ ID NO: 271 - protein, 38 aa, Mus musculus; identical to SEQ ID NO: 270

SEQ ID NO: 272 - protein, 38 aa, Mus musculus
YGPSSVEDTTGSGAADAKDDDDIDLFGSDDEEESEEAK

SEQ ID NO: 273 - protein, 42 aa, Mus musculus; identical to SEQ ID NO: 140

SEQ ID NO: 274 - protein, 34 aa, Mus musculus; identical to SEQ ID NO: 174

SEQ ID NO: 275 - protein, 13 aa, Mus musculus
SRTPSASHEEQQE

SEQ ID NO: 276 - protein, 13 aa, Mus musculus
SRTPSASHEEQQE

SEQ ID NO: 277 - protein, 10 aa, Mus musculus
FGTFGGLGSK

SEQ ID NO: 278 - protein, 37 aa, Mus musculus
LQDISELLATGVGLSDSEVEPDGEHNTTELPQAVAGR

SEQ ID NO: 279 - protein, 13 aa, Mus musculus
SQDDAMVDYFFQR

SEQ ID NO: 280 - protein, 35 aa, Mus musculus
LSESSALKQPATPTAAESSEGEGEEGDDGGETESR

SEQ ID NO: 281 - protein, 22 aa, Mus musculus
SLLSHEFQDETDTEEETLYSSK

SEQ ID NO: 282 - protein, 22 aa, Mus musculus
TSALLFSSDEEDQWNIADSHTK

SEQ ID NO: 283 - protein, 22 aa, Mus musculus
TSALLFSSDEEDQWNIADSHTK

SEQ ID NO: 284 - protein, 20 aa, Mus musculus
SSGSSSSGLGTVSSSPASQR

SEQ ID NO: 285 - protein, 39 aa, Mus musculus; identical to SEQ ID NO: 175

SEQ ID NO: 286 - protein, 39 aa, Mus musculus; identical to SEQ ID NO: 175

SEQ ID NO: 287 - protein, 13 aa, Mus musculus
RSSSELSPEVVEK

SEQ ID NO: 288 - protein, 13 aa, Mus musculus
SRTPSASHEEQQE

SEQ ID NO: 289 - protein, 13 aa, Mus musculus
SRTPSASHEEQQE

SEQ ID NO: 290 - protein, 13 aa, Mus musculus
SRTPSASHEEQQE

SEQ ID NO: 291 - protein, 33 aa, Mus musculus
VLQESDVSPSSSTTSLPISPLTEEPLPFKDITR

SEQ ID NO: 292 - protein, 14 aa, Mus musculus
ALSLSSADSTDAKR

SEQ ID NO: 293 - protein, 37 aa, Mus musculus; identical to SEQ ID NO: 278

SEQ ID NO: 294 - protein, 37 aa, Mus musculus
AKPAAQSEEETATSPAASPTPQSAERSPSQEPSAPGK

SEQ ID NO: 295 - protein, 11 aa, Mus musculus
RLSSTGGQTPR

SEQ ID NO: 296 - protein, 13 aa, Mus musculus
RSSSELSPEVVEK

SEQ ID NO: 297 - protein, 18 aa, Mus musculus
KPAQETEETSSQESAEED

SEQ ID NO: 298 - protein, 18 aa, Mus musculus
KGSSGNASEVSVACLTER

SEQ ID NO: 299 - protein, 34 aa, Mus musculus; identical to SEQ ID NO: 174

SEQ ID NO: 300 - protein, 18 aa, Mus musculus
GFLDGVYSFEYYPSTPGK

SEQ ID NO: 301 - protein, 15 aa, Mus musculus
LDLDLTSDSQPPVFK

SEQ ID NO: 302 - protein, 10 aa, Mus musculus
HSGSTSPYPK

SEQ ID NO: 303 - protein, 23 aa, Mus musculus
TSTFCGTPEFLAPEVLTETSYTR

SEQ ID NO: 304 - protein, 28 aa, Mus musculus
SNSFSDEREFSAPSTPTGTLEFAGGDAK

SEQ ID NO: 305 - protein, 26 aa, Mus musculus
VSLLGPVTTPEFQLVKTPLSSSLSQR

SEQ ID NO: 306 - protein, 16 aa, Mus musculus
GSLSRSSSPVTELTAR

SEQ ID NO: 307 - protein, 39 aa, Mus musculus; identical to SEQ ID NO: 175

SEQ ID NO: 308 - protein, 26 aa, Mus musculus
VSALEEDMDDVESSEEEEEEDEKLER

SEQ ID NO: 309 - protein, 26 aa, Mus musculus
VSALEEDMDDVESSEEEEEEDEKLER

SEQ ID NO: 310 - protein, 13 aa, Mus musculus
SRTPSASHEEQQE

SEQ ID NO: 311 - protein, 13 aa, Mus musculus
SRTPSASHEEQQE

SEQ ID NO: 312 - protein, 31 aa, Mus musculus
SLEETLHNVDLSSDDELPRDEEALEDSAEEK

SEQ ID NO: 313 - protein, 15 aa, Mus musculus
HSSHDMLSHSWEGNR

SEQ ID NO: 314 - protein, 42 aa, Mus musculus
TESILDKEDKVPMAGVGGTEGPEQLPAPCPSQTGSPPVGLIK

SEQ ID NO: 315 - protein, 30 aa, Mus musculus
KQTPPASPSPQPIEDRPPSSPIYEDAAPFK

SEQ ID NO: 316 - protein, 35 aa, Mus musculus
TVSLGAGAKDELHIVEAEAMNYEGSPIKVTLATLK

SEQ ID NO: 317 - protein, 33 aa, Mus musculus; identical to SEQ ID NO: 247

SEQ ID NO: 318 - protein, 33 aa, Mus musculus; identical to SEQ ID NO: 247

SEQ ID NO: 319 - protein, 20 aa, Mus musculus
GDQVLNFSDAEDLIDDSKLK

SEQ ID NO: 320 - protein, 20 aa, Mus musculus
GDQVLNFSDAEDLIDDSKLK

SEQ ID NO: 321 - protein, 28 aa, Mus musculus
SNSFSDEREFSAPSTPTGTLEFAGGDAK

SEQ ID NO: 322 - protein, 13 aa, Mus musculus
SRTPSASHEEQQE

SEQ ID NO: 323 - protein, 12 aa, Mus musculus
SSPNPFVGSPPK

SEQ ID NO: 324 - protein, 34 aa, Mus musculus; identical to SEQ ID NO: 174

SEQ ID NO: 325 - protein, 13 aa, Mus musculus
RSSSELSPEVVEK

SEQ ID NO: 326 - protein, 13 aa, Mus musculus
RSSSELSPEVVEK

SEQ ID NO: 327 - protein, 13 aa, Mus musculus
SRTPSASHEEQQE

SEQ ID NO: 328 - protein, 14 aa, Mus musculus
ALSLSSADSTDAKR

SEQ ID NO: 329 - protein, 13 aa, Mus musculus
RSSSELSPEVVEK

SEQ ID NO: 330 - protein, 13 aa, Mus musculus
RSSSELSPEVVEK

SEQ ID NO: 331 - protein, 36 aa, Mus musculus
VSPPASPTLDVELGAGEAPLQGAVGPELPLGGSHGR

SEQ ID NO: 332 - protein, 13 aa, Mus musculus
RSSSELSPEVVEK

SEQ ID NO: 333 - protein, 18 aa, Mus musculus
TEMDKSPFNSPSPQDSPR

SEQ ID NO: 334 - protein, 13 aa, Mus musculus
RSTSPIIGSPPVR

SEQ ID NO: 335 - protein, 13 aa, Mus musculus
RSSSELSPEVVEK

SEQ ID NO: 336 - protein, 13 aa, Mus musculus
SRTPSASHEEQQE

SEQ ID NO: 337 - protein, 24 aa, Mus musculus
HGSGADSDYENTQSGDPLLGLEGK

SEQ ID NO: 338 - protein, 24 aa, Mus musculus
HGSGADSDYENTQSGDPLLGLEGK

SEQ ID NO: 339 - protein, 44 aa, Mus musculus
IHTTALTGQSPPLASGHQGEGDAPSVEPGATNIQQPSSPAPSTK

SEQ ID NO: 340 - protein, 15 aa, Mus musculus
TRLASESANDDNEDS

SEQ ID NO: 341 - protein, 16 aa, Mus musculus
GSLSRSSSPVTELTAR

SEQ ID NO: 342 - protein, 18 aa, Mus musculus
GDQVLNFSDAEDLIDDSK

SEQ ID NO: 343 - protein, 13 aa, Mus musculus
RSSSELSPEVVEK

SEQ ID NO: 344 - protein, 19 aa, Mus musculus
SIDPDSIQSALLASGLGSK

SEQ ID NO: 345 - protein, 19 aa, Mus musculus
SIDPDSIQSALLASGLGSK

SEQ ID NO: 346 - protein, 34 aa, Mus musculus; identical to SEQ ID NO: 174

SEQ ID NO: 347 - protein, 41 aa, Mus musculus
ATPTESPEKPPPPAVQRDEDDDALFSEPALAQISSSNVLLK

SEQ ID NO: 348 - protein, 31 aa, Mus musculus
EVSVSSVTEEPKLDSSQLPLQTGLDVPATPR

SEQ ID NO: 349 - protein, 35 aa, Mus musculus
SAFTPATATGSSPSPVLGQGEKVEGLQAQALYPWR

SEQ ID NO: 350 - protein, 42 aa, Mus musculus; identical to SEQ ID NO: 140

SEQ ID NO: 351 - protein, 16 aa, Mus musculus
VVCDADDSDSDVVSDK

SEQ ID NO: 352 - protein, 38 aa, Mus musculus
QNPEQSADEDAEKNEEDSEGSSDEDEDEDGVGNTTFLK

SEQ ID NO: 353 - protein, 28 aa, Mus musculus
VSESVADDSSSRDSFTQSLESLTSGLCK

SEQ ID NO: 354 - protein, 11 aa, Mus musculus
RGQSPQPDQGP

SEQ ID NO: 355 - protein, 31 aa, Mus musculus
TPVASECTQTDGAEEVAGSCPQTTTHSPPSK

SEQ ID NO: 356 - protein, 31 aa, Mus musculus
KGSDDDGGDSPVQDIDTPEVDLYQLQVNTLR

SEQ ID NO: 357 - protein, 31 aa, Mus musculus; identical to SEQ ID NO: 356

SEQ ID NO: 358 - protein, 42 aa, Mus musculus; identical to SEQ ID NO: 140

SEQ ID NO: 359 - protein, 15 aa, Mus musculus
TRLASESANDDNEDS

SEQ ID NO: 360 - protein, 20 aa, Mus musculus
GTSRPGTPSAEAASTSSTLR

SEQ ID NO: 361 - protein, 31 aa, Mus musculus
GSASESPSASVAEATTTDVQVTPTALLQLDR

SEQ ID NO: 362 - protein, 31 aa, Mus musculus; identical to SEQ ID NO: 361

SEQ ID NO: 363 - protein, 22 aa, Mus musculus
SYQNSPSSEDGIRPLPEYSTEK

SEQ ID NO: 364 - protein, 24 aa, Mus musculus
SLVSPIPSPTGTISVPNSCPASPR

SEQ ID NO: 365 - protein, 38 aa, Mus musculus; identical to SEQ ID NO: 272

SEQ ID NO: 366 - protein, 42 aa, Mus musculus; identical to SEQ ID NO: 140

SEQ ID NO: 367 - protein, 15 aa, Mus musculus
SSTHASVSPASEPSR

SEQ ID NO: 368 - protein, 15 aa, Mus musculus
TRLASESANDDNEDS

SEQ ID NO: 369 - protein, 15 aa, Mus musculus
TRLASESANDDNEDS

SEQ ID NO: 370 - protein, 31 aa, Mus musculus; identical to SEQ ID NO: 361

SEQ ID NO: 371 - protein, 45 aa, Mus musculus
RSPGGTSPPNGGLPGPLTATAAPPGPPAAVSPCLGPAAAAGSGLR

SEQ ID NO: 372 - protein, 18 aa, Mus musculus
SESLIDASEDSQLEAAIR

SEQ ID NO: 373 - protein, 29 aa, Mus musculus
RNTFIGTPYWMAPEVIACDENPDATYDYR

SEQ ID NO: 374 - protein, 20 aa, Mus musculus
SLSQSFENLLDEPAYGLIQK

SEQ ID NO: 375 - protein, 34 aa, Mus musculus
KLDDQSEDEALELEGPLIMPGSGSIYSSPGLYSK

SEQ ID NO: 376 - protein, 11 aa, Mus musculus
EVDYSDSLTEK

SEQ ID NO: 377 - protein, 11 aa, Mus musculus
STTPTPSVITR

SEQ ID NO: 378 - protein, 20 aa, Mus musculus
GTSRPGTPSAEAASTSSTLR

SEQ ID NO: 379 - protein, 11 aa, Mus musculus
LSSKLSAVSLR

SEQ ID NO: 380 - protein, 13 aa, Mus musculus
SRTPSASHEEQQE

SEQ ID NO: 381 - protein, 42 aa, Mus musculus; identical to SEQ ID NO: 140

SEQ ID NO: 382 - protein, 42 aa, Mus musculus; identical to SEQ ID NO: 140

SEQ ID NO: 383 - protein, 20 aa, Mus musculus
LRTDNASDASESSDAESSSK

SEQ ID NO: 384 - protein, 8 aa, Mus musculus
SVSSPRTK

SEQ ID NO: 385 - protein, 17 aa, Mus musculus
THSTSSSIGSGESPFSR

SEQ ID NO: 386 - protein, 17 aa, Mus musculus
THSTSSSIGSGESPFSR

SEQ ID NO: 387 - protein, 17 aa, Mus musculus
KEESEESEDDMGFGLFD

SEQ ID NO: 388 - protein, 19 aa, Mus musculus
GGVTGSPEASISGSKGDLK

SEQ ID NO: 389 - protein, 14 aa, Mus musculus
SQDAESYQNVVELK

SEQ ID NO: 390 - protein, 8 aa, Mus musculus
LGSQEPER

SEQ ID NO: 391 - protein, 16 aa, Mus musculus
VVCDADDSDSDVVSDK

SEQ ID NO: 392 - protein, 12 aa, Mus musculus
LCSSSSSDTSPR

SEQ ID NO: 393 - protein, 15 aa, Mus musculus
TRLASESANDDNEDS

SEQ ID NO: 394 - protein, 15 aa, Mus musculus
TRLASESANDDNEDS

SEQ ID NO: 395 - protein, 35 aa, Mus musculus
IDEPNTPYHNMIGDDEDAYSDSEGNEVMTPDILAK

SEQ ID NO: 396 - protein, 35 aa, Mus musculus; identical to SEQ ID NO: 395

SEQ ID NO: 397 - protein, 19 aa, Mus musculus
LLCQEETPEATEDERDEER

SEQ ID NO: 398 - protein, 18 aa, Mus musculus
WAAHGTSPEDFSLTLGAR

SEQ ID NO: 399 - protein, 18 aa, Mus musculus
WAAHGTSPEDFSLTLGAR

SEQ ID NO: 400 - protein, 33 aa, Mus musculus
SSHQDATDPEALWGVHQTEADSTSEGPEDEAQR

SEQ ID NO: 401 - protein, 12 aa, Mus musculus
LCSSSSSDTSPR

SEQ ID NO: 402 - protein, 19 aa, Mus musculus
SVDIFGSTPFQPFSVSASK

SEQ ID NO: 403 - protein, 12 aa, Mus musculus
LCSSSSSDTSPR

SEQ ID NO: 404 - protein, 12 aa, Mus musculus
LCSSSSSDTSPR

SEQ ID NO: 405 - protein, 20 aa, Mus musculus
EFSAPSTPTGTLEFAGGDAK

SEQ ID NO: 406 - protein, 34 aa, Mus musculus; identical to SEQ ID NO: 174

SEQ ID NO: 407 - protein, 12 aa, Mus musculus
LCSSSSSDTSPR

SEQ ID NO: 408 - protein, 12 aa, Mus musculus
LCSSSSSDTSPR

SEQ ID NO: 409 - protein, 12 aa, Mus musculus
LVVSSPTSPKGK

SEQ ID NO: 410 - protein, 12 aa, Mus musculus
LCSSSSSDTSPR

SEQ ID NO: 411 - protein, 12 aa, Mus musculus
LCSSSSSDTSPR

SEQ ID NO: 412 - protein, 32 aa, Mus musculus
DGAGSPLRTSPPSTPSSPDDTFFNLGDLQNGR

SEQ ID NO: 413 - protein, 15 aa, Mus musculus
VLTANSNPSSPSAAK

SEQ ID NO: 414 - protein, 12 aa, Mus musculus
LCSSSSSDTSPR

SEQ ID NO: 415 - protein, 22 aa, Mus musculus
STRHSPSALQDVFVELLSPHSK

SEQ ID NO: 416 - protein, 12 aa, Mus musculus
SSPNPFVGSPPK

SEQ ID NO: 417 - protein, 12 aa, Mus musculus
SSPNPFVGSPPK

SEQ ID NO: 418 - protein, 12 aa, Mus musculus
SSPNPFVGSPPK

SEQ ID NO: 419 - protein, 28 aa, Mus musculus
GCSPPKSPEKPPQSTSSESCPPSPQPTK

SEQ ID NO: 420 - protein, 19 aa, Mus musculus
GGVTGSPEASISGSKGDLK

SEQ ID NO: 421 - protein, 18 aa, Mus musculus
DKPVYDELFYTLSPINGK

SEQ ID NO: 422 - protein, 21 aa, Mus musculus
HDHAVSLLTAASPTISLLLER

SEQ ID NO: 423 - protein, 26 aa, Mus musculus
GLNLDGTPALSTLGGFSPASKPSSPR

SEQ ID NO: 424 - protein, 26 aa, Mus musculus
GLNLDGTPALSTLGGFSPASKPSSPR

SEQ ID NO: 425 - protein, 18 aa, Mus musculus
METVSNASSSSNPSSPGR

SEQ ID NO: 426 - protein, 18 aa, Mus musculus
METVSNASSSSNPSSPGR

SEQ ID NO: 427 - protein, 16 aa, Mus musculus
HSGSDRSSFSHYSGLK

SEQ ID NO: 428 - protein, 14 aa, Mus musculus
SQDAESYQNVVELK

SEQ ID NO: 429 - protein, 20 aa, Mus musculus
GTSRPGTPSAEAASTSSTLR

SEQ ID NO: 430 - protein, 17 aa, Mus musculus
KVAPLSSSLDTSLDFSK

SEQ ID NO: 431 - protein, 18 aa, Mus musculus
SVSENSLVAMDFSGQIGR

SEQ ID NO: 432 - protein, 26 aa, Mus musculus
KTSFDQDSDVDIFPSDFTSEPPALPR

SEQ ID NO: 433 - protein, 18 aa, Mus musculus
KPAQETEETSSQESAEED

SEQ ID NO: 434 - protein, 18 aa, Mus musculus
KPAQETEETSSQESAEED

SEQ ID NO: 435 - protein, 38 aa, Mus musculus; identical to SEQ ID NO: 272

SEQ ID NO: 436 - protein, 15 aa, Mus musculus
ESLPLDLSDDQSNSK

SEQ ID NO: 437 - protein, 38 aa, Mus musculus; identical to SEQ ID NO: 233

SEQ ID NO: 438 - protein, 19 aa, Mus musculus
GGVTGSPEASISGSKGDLK

SEQ ID NO: 439 - protein, 17 aa, Mus musculus
THSTSSSIGSGESPFSR

SEQ ID NO: 440 - protein, 26 aa, Mus musculus
VLSPLRSPPLLGSESPYEDFLSADSK

SEQ ID NO: 441 - protein, 36 aa, Mus musculus
GPQQDSDSDDGEALGGNPMVAGFQDDVDIEDQTHGK

SEQ ID NO: 442 - protein, 36 aa, Mus musculus; identical to SEQ ID NO: 441

SEQ ID NO: 443 - protein, 18 aa, Mus musculus
GRESDEDTEDASETDLAK

SEQ ID NO: 444 - protein, 18 aa, Mus musculus
SASSDTSEELNSQDSPKR

SEQ ID NO: 445 - protein, 17 aa, Mus musculus
THSTSSSIGSGESPFSR

SEQ ID NO: 446 - protein, 10 aa, Mus musculus
FRTITSSYYR

SEQ ID NO: 447 - protein, 18 aa, Mus musculus
TISAQDTLAYATALLNEK

SEQ ID NO: 448 - protein, 16 aa, Mus musculus
NTPSQHSHSIQHSPER

SEQ ID NO: 449 - protein, 18 aa, Mus musculus
AESPETSAVESTQSTPQK

SEQ ID NO: 450 - protein, 18 aa, Mus musculus
METVSNASSSSNPSSPGR

SEQ ID NO: 451 - protein, 18 aa, Mus musculus
METVSNASSSSNPSSPGR

SEQ ID NO: 452 - protein, 26 aa, Mus musculus
KDSPPLVTPPQSPPSSQPPAMTQAPR

SEQ ID NO: 453 - protein, 10 aa, Mus musculus
SSPSILAVQR

SEQ ID NO: 454 - protein, 10 aa, Mus musculus
SSPSILAVQR

SEQ ID NO: 455 - protein, 17 aa, Mus musculus
TSSIADEGTYTLDSILR

SEQ ID NO: 456 - protein, 34 aa, Mus musculus
SAFKLDSDSDEEDAQFFSMASGVPQTPAPEPSRR

SEQ ID NO: 457 - protein, 19 aa, Mus musculus
ASYSGTSPSHSFISGEPDR

SEQ ID NO: 458 - protein, 28 aa, Mus musculus
GCSPPKSPEKPPQSTSSESCPPSPQPTK

SEQ ID NO: 459 - protein, 27 aa, Mus musculus
SSSSASQSNHSCTSMPSSPATPASGTK

SEQ ID NO: 460 - protein, 17 aa, Mus musculus
THSTSSSIGSGESPFSR

SEQ ID NO: 461 - protein, 17 aa, Mus musculus
RSKSPPKSPEEEGAVSS

SEQ ID NO: 462 - protein, 18 aa, Mus musculus
RSSTPLPTVSSSAENTRQ

SEQ ID NO: 463 - protein, 17 aa, Mus musculus
RTDSVIIADQTPTPTRF

SEQ ID NO: 464 - protein, 15 aa, Mus musculus
VAPAGSAISNASGER

SEQ ID NO: 465 - protein, 11 aa, Mus musculus
RLSSLRASTSK

SEQ ID NO: 466 - protein, 11 aa, Mus musculus
RLSSLRASTSK

SEQ ID NO: 467 - protein, 19 aa, Mus musculus
ELSHSPPRENSFESSLEFK

SEQ ID NO: 468 - protein, 11 aa, Mus musculus
RLSSLRASTSK

SEQ ID NO: 469 - protein, 9 aa, Mus musculus
NFLSMDSLK

SEQ ID NO: 470 - protein, 44 aa, Mus musculus
NLAITGGVTLSVIASPVIAAVSVGIGVPIMLAYVYGVVPISLCR

SEQ ID NO: 471 - protein, 11 aa, Mus musculus
RLSSLRASTSK

SEQ ID NO: 472 - protein, 9 aa, Mus musculus
TRTFSATVR

SEQ ID NO: 473 - protein, 9 aa, Mus musculus
TRTFSATVR

SEQ ID NO: 474 - protein, 9 aa, Mus musculus
TRTFSATVR

SEQ ID NO: 475 - protein, 11 aa, Mus musculus
RLSSLRASTSK

SEQ ID NO: 476 - protein, 21 aa, Mus musculus
GLCSGPGAGEESPAATLPRMK

SEQ ID NO: 477 - protein, 10 aa, Mus musculus
LSSLRASTSK

SEQ ID NO: 478 - protein, 10 aa, Mus musculus
LSSLRASTSK

SEQ ID NO: 479 - protein, 11 aa, Mus musculus
AHVAPCFDASK

SEQ ID NO: 480 - protein, 17 aa, Mus musculus
WTNDYSMVLTGAAIYHK

SEQ ID NO: 481 - protein, 10 aa, Mus musculus
LSSLRASTSK

SEQ ID NO: 482 - protein, 10 aa, Mus musculus
LSSLRASTSK

SEQ ID NO: 483 - protein, 11 aa, Mus musculus
RLSSLRASTSK

SEQ ID NO: 484 - protein, 11 aa, Mus musculus
AHVAPCFDASK

SEQ ID NO: 485 - protein, 12 aa, Mus musculus
LVYPEVKESKFK

SEQ ID NO: 486 - protein, 11 aa, Mus musculus
RLSSLRASTSK

SEQ ID NO: 487 - protein, 31 aa, Mus musculus; identical to SEQ ID NO: 168

SEQ ID NO: 488 - protein, 14 aa, Mus musculus
RLGAAMTFPRPPSR

SEQ ID NO: 489 - protein, 13 aa, Mus musculus
ATAPQTQHVSPMR

SEQ ID NO: 490 - protein, 30 aa, Mus musculus; identical to SEQ ID NO: 136

SEQ ID NO: 491 - protein, 30 aa, Mus musculus; identical to SEQ ID NO: 136

SEQ ID NO: 492 - protein, 11 aa, Mus musculus
AHVAPCFDASK

SEQ ID NO: 493 - protein, 10 aa, Mus musculus
LKPDSKPFSR

SEQ ID NO: 494 - protein, 9 aa, Mus musculus
ESLSHVLSK

SEQ ID NO: 495 - protein, 16 aa, Mus musculus
TECGSTGSPASSFHFK

SEQ ID NO: 496 - protein, 16 aa, Mus musculus
TECGSTGSPASSFHFK

SEQ ID NO: 497 - protein, 8 aa, Mus musculus
LYTEKAYK

SEQ ID NO: 498 - protein, 9 aa, Mus musculus
SRVSVSPGR

SEQ ID NO: 499 - protein, 26 aa, Mus musculus
RKTVSFSAAEEAPVPEPSTAAPLQAK

SEQ ID NO: 500 - protein, 26 aa, Mus musculus
RKTVSFSAAEEAPVPEPSTAAPLQAK

SEQ ID NO: 501 - protein, 26 aa, Mus musculus
RKTVSFSAAEEAPVPEPSTAAPLQAK

SEQ ID NO: 502 - protein, 27 aa, Mus musculus
SGHSLLTWDSAMSALSSASSSSCCTLR

SEQ ID NO: 503 - protein, 33 aa, Mus musculus
RKYGMLHTQESSSSVFYPSQDEGLSPGSGNCAK

SEQ ID NO: 504 - protein, 23 aa, Mus musculus
SDSSGGYTLSDVIQSPPSAGLLK

SEQ ID NO: 505 - protein, 23 aa, Mus musculus
SDSSGGYTLSDVIQSPPSAGLLK

SEQ ID NO: 506 - protein, 21 aa, Mus musculus
GLCSGPGAGEESPAATLPRMK

SEQ ID NO: 507 - protein, 9 aa, Mus musculus
TFWSPELKK

SEQ ID NO: 508 - protein, 16 aa, Mus musculus
TECGSTGSPASSFHFK

SEQ ID NO: 509 - protein, 21 aa, Mus musculus
GLCSGPGAGEESPAATLPRMK

SEQ ID NO: 510 - protein, 16 aa, Mus musculus
LSSLRASTSKSESSQK

SEQ ID NO: 511 - protein, 16 aa, Mus musculus
LSSLRASTSKSESSQK

SEQ ID NO: 512 - protein, 6 aa, Mus musculus
RLSSLR

SEQ ID NO: 513 - protein, 6 aa, Mus musculus
RLSSLR

SEQ ID NO: 514 - protein, 16 aa, Mus musculus
LSSLRASTSKSESSQK

SEQ ID NO: 515 - protein, 20 aa, Mus musculus
AALDQTSGLPGGAAQDPGGR

SEQ ID NO: 516 - protein, 6 aa, Mus musculus
RLSSLR

SEQ ID NO: 517 - protein, 6 aa, Mus musculus
RLSSLR

SEQ ID NO: 518 - protein, 21 aa, Mus musculus
MNILSSQSPLHPSTLNAVIHR

SEQ ID NO: 519 - protein, 21 aa, Mus musculus
MNILSSQSPLHPSTLNAVIHR

SEQ ID NO: 520 - protein, 24 aa, Mus musculus
SLVSPIPSPTGTISVPNSCPASPR

SEQ ID NO: 521 - protein, 7 aa, Mus musculus
IRSSLAR

SEQ ID NO: 522 - protein, 11 aa, Mus musculus
RLSSLRASTSK

SEQ ID NO: 523 - protein, 21 aa, Mus musculus
MNILSSQSPLHPSTLNAVIHR

SEQ ID NO: 524 - protein, 14 aa, Mus musculus
LLDPQEFTLSGTQR

SEQ ID NO: 525 - protein, 11 aa, Mus musculus
RLSSLRASTSK

SEQ ID NO: 526 - protein, 27 aa, Mus musculus
TASISSSPSEGTPAVGSYGCTPQSLPK

SEQ ID NO: 527 - protein, 12 aa, Mus musculus
SLLVLRGTAYTR

SEQ ID NO: 528 - protein, 21 aa, Mus musculus
MNILSSQSPLHPSTLNAVIHR

SEQ ID NO: 529 - protein, 27 aa, Mus musculus
TASISSSPSEGTPAVGSYGCTPQSLPK

SEQ ID NO: 530 - protein, 27 aa, Mus musculus
TASISSSPSEGTPAVGSYGCTPQSLPK

SEQ ID NO: 531 - protein, 16 aa, Mus musculus
TECGSTGSPASSFHFK

SEQ ID NO: 532 - protein, 27 aa, Mus musculus
TASISSSPSEGTPAVGSYGCTPQSLPK

SEQ ID NO: 533 - protein, 21 aa, Mus musculus
MNILSSQSPLHPSTLNAVIHR

SEQ ID NO: 534 - protein, 20 aa, Mus musculus
TASEGSEAETPEAPKQPAKK

SEQ ID NO: 535 - protein, 20 aa, Mus musculus
TASEGSEAETPEAPKQPAKK

SEQ ID NO: 536 - protein, 21 aa, Mus musculus
MNILSSQSPLHPSTLNAVIHR

SEQ ID NO: 537 - protein, 21 aa, Mus musculus
MNILSSQSPLHPSTLNAVIHR

SEQ ID NO: 538 - protein, 27 aa, Mus musculus
TASISSSPSEGTPAVGSYGCTPQSLPK

SEQ ID NO: 539 - protein, 16 aa, Mus musculus
TECGSTGSPASSFHFK

SEQ ID NO: 540 - protein, 12 aa, Mus musculus
VKTPEMIIQKPK

SEQ ID NO: 541 - protein, 27 aa, Mus musculus
TASISSSPSEGTPAVGSYGCTPQSLPK

SEQ ID NO: 542 - protein, 27 aa, Mus musculus
TASISSSPSEGTPAVGSYGCTPQSLPK

SEQ ID NO: 543 - protein, 39 aa, Mus musculus
YGPSSVEDTTGSGAADAKDDDDIDLFGSDDEEESEEAKK

SEQ ID NO: 544 - protein, 39 aa, Mus musculus; identical to SEQ ID NO: 543

SEQ ID NO: 545 - protein, 39 aa, Mus musculus
AVVPFLGVGFSSLDMSLCVVLYVASSLFLMIMYFFFRVR

SEQ ID NO: 546 - protein, 35 aa, Mus musculus
KFSAPGQLCVPMTSNLGGSTPISAASATSLGHFTK

SEQ ID NO: 547 - protein, 16 aa, Mus musculus
MTSTDYSLSGTCGMDR

SEQ ID NO: 548 - protein, 23 aa, Mus musculus
SDSSGGYTLSDVIQSPPSAGLLK

SEQ ID NO: 549 - protein, 25 aa, Mus musculus
KRSDSSGGYTLSDVIQSPPSAGLLK

SEQ ID NO: 550 - protein, 21 aa, Mus musculus
MNILSSQSPLHPSTLNAVIHR

SEQ ID NO: 551 - protein, 21 aa, Mus musculus
MNILSSQSPLHPSTLNAVIHR

SEQ ID NO: 552 - protein, 21 aa, Mus musculus
MNILSSQSPLHPSTLNAVIHR

SEQ ID NO: 553 - protein, 26 aa, Mus musculus
QFCQEGQPHVLEALSPPQTSGLSPSR

SEQ ID NO: 554 - protein, 27 aa, Mus musculus
TASISSSPSEGTPAVGSYGCTPQSLPK

SEQ ID NO: 555 - protein, 21 aa, Mus musculus
MNILSSQSPLHPSTLNAVIHR

SEQ ID NO: 556 - protein, 21 aa, Mus musculus
MNILSSQSPLHPSTLNAVIHR

SEQ ID NO: 557 - protein, 31 aa, Mus musculus; identical to SEQ ID NO: 348

SEQ ID NO: 558 - protein, 21 aa, Mus musculus
MNILSSQSPLHPSTLNAVIHR

SEQ ID NO: 559 - protein, 21 aa, Mus musculus
MNILSSQSPLHPSTLNAVIHR

SEQ ID NO: 560 - protein, 30 aa, Mus musculus; identical to SEQ ID NO: 136

SEQ ID NO: 561 - protein, 30 aa, Mus musculus; identical to SEQ ID NO: 136

SEQ ID NO: 562 - protein, 18 aa, Mus musculus
KDELSDWSLAGEDDRETR

SEQ ID NO: 563 - protein, 21 aa, Mus musculus
MNILSSQSPLHPSTLNAVIHR

SEQ ID NO: 564 - protein, 21 aa, Mus musculus
MNILSSQSPLHPSTLNAVIHR

SEQ ID NO: 565 - protein, 26 aa, Mus musculus
QFCQEGQPHVLEALSPPQTSGLSPSR

SEQ ID NO: 566 - protein, 21 aa, Mus musculus
MNILSSQSPLHPSTLNAVIHR

SEQ ID NO: 567 - protein, 21 aa, Mus musculus
MNILSSQSPLHPSTLNAVIHR

SEQ ID NO: 568 - protein, 21 aa, Mus musculus
MNILSSQSPLHPSTLNAVIHR

SEQ ID NO: 569 - protein, 21 aa, Mus musculus
MNILSSQSPLHPSTLNAVIHR

SEQ ID NO: 570 - protein, 25 aa, Mus musculus
QADSETKEIITEEPSEEEADMPKPK

SEQ ID NO: 571 - protein, 24 aa, Mus musculus
LHYTPPLQSPITDGDPLLGQSPWR

SEQ ID NO: 572 - protein, 21 aa, Mus musculus
MNILSSQSPLHPSTLNAVIHR

SEQ ID NO: 573 - protein, 21 aa, Mus musculus
MNILSSQSPLHPSTLNAVIHR

SEQ ID NO: 574 - protein, 26 aa, Mus musculus
SSGLQTPECLSREGSPIPHDPDLGSK

SEQ ID NO: 575 - protein, 26 aa, Mus musculus
SSGLQTPECLSREGSPIPHDPDLGSK

SEQ ID NO: 576 - protein, 34 aa, Mus musculus
SHILESVPTLPGSVEAGVSFDLPAQADTLHSANK

SEQ ID NO: 577 - protein, 42 aa, Mus musculus; identical to SEQ ID NO: 195

SEQ ID NO: 578 - protein, 27 aa, Mus musculus
TASISSSPSEGTPAVGSYGCTPQSLPK

SEQ ID NO: 579 - protein, 27 aa, Mus musculus
TASISSSPSEGTPAVGSYGCTPQSLPK

SEQ ID NO: 580 - protein, 26 aa, Mus musculus
SSGLQTPECLSREGSPIPHDPDLGSK

SEQ ID NO: 581 - protein, 17 aa, Mus musculus
TQSGNFNTDAPGMAEFR

SEQ ID NO: 582 - protein, 23 aa, Mus musculus
SDSSGGYTLSDVIQSPPSAGLLK

SEQ ID NO: 583 - protein, 8 aa, Mus musculus
SEGLSLER

SEQ ID NO: 584 - protein, 34 aa, Mus musculus
TASEGDGGAAGGAGTAGGRPMSVAGSPLSPGPVR

SEQ ID NO: 585 - protein, 27 aa, Mus musculus
TASISSSPSEGTPAVGSYGCTPQSLPK

SEQ ID NO: 586 - protein, 27 aa, Mus musculus
TASISSSPSEGTPAVGSYGCTPQSLPK

SEQ ID NO: 587 - protein, 9 aa, Mus musculus
RSEGLSLER

SEQ ID NO: 588 - protein, 24 aa, Mus musculus
SLVSPIPSPTGTISVPNSCPASPR

SEQ ID NO: 589 - protein, 24 aa, Mus musculus
SLVSPIPSPTGTISVPNSCPASPR

SEQ ID NO: 590 - protein, 24 aa, Mus musculus
SLVSPIPSPTGTISVPNSCPASPR

SEQ ID NO: 591 - protein, 9 aa, Mus musculus
HSSPPLTVK

SEQ ID NO: 592 - protein, 15 aa, Mus musculus
RRSGEQITSSPVSPK

SEQ ID NO: 593 - protein, 29 aa, Mus musculus
GATPAEDDEDKDIDLFGSDEEEEDKEAAR

SEQ ID NO: 594 - protein, 29 aa, Mus musculus
GATPAEDDEDKDIDLFGSDEEEEDKEAAR

SEQ ID NO: 595 - protein, 20 aa, Mus musculus
SQDVAISPQQQQCSKSYVDR

SEQ ID NO: 596 - protein, 18 aa, Mus musculus
VSSSVSVGPSMSGETLPR

SEQ ID NO: 597 - protein, 9 aa, Mus musculus
HSSPPLTVK

SEQ ID NO: 598 - protein, 23 aa, Mus musculus
RVSTDLPEGQDVYTAACNSVIHR

SEQ ID NO: 599 - protein, 29 aa, Mus musculus
SGDPRSCEEESDPEPDPDPDTQAEAYVAR

SEQ ID NO: 600 - protein, 25 aa, Mus musculus
VDTAASSSWLAGSCSPVSPPVVDLR

SEQ ID NO: 601 - protein, 20 aa, Mus musculus
SQDVAISPQQQQCSKSYVDR

SEQ ID NO: 602 - protein, 20 aa, Mus musculus
SQDVAISPQQQQCSKSYVDR

SEQ ID NO: 603 - protein, 18 aa, Mus musculus
KDELSDWSLAGEDDRETR

SEQ ID NO: 604 - protein, 22 aa, Mus musculus
RSSAGSLESNVEGSIISSPHMR

SEQ ID NO: 605 - protein, 22 aa, Mus musculus
RSSAGSLESNVEGSIISSPHMR

SEQ ID NO: 606 - protein, 25 aa, Mus musculus
GPPDFSSDEEREPTPVLGSGASVGR

SEQ ID NO: 607 - protein, 25 aa, Mus musculus
GPPDFSSDEEREPTPVLGSGASVGR

SEQ ID NO: 608 - protein, 33 aa, Mus musculus
NASTSFQELEDKKELSEESEDEELQLEEFPMLK

SEQ ID NO: 609 - protein, 20 aa, Mus musculus
TSASCSPAPESPMSSSESVK

SEQ ID NO: 610 - protein, 8 aa, Mus musculus
SEGLSLER

SEQ ID NO: 611 - protein, 34 aa, Mus musculus; identical to SEQ ID NO: 576

SEQ ID NO: 612 - protein, 34 aa, Mus musculus; identical to SEQ ID NO: 576

SEQ ID NO: 613 - protein, 29 aa, Mus musculus
SGDPRSCEEESDPEPDPDPDTQAEAYVAR

SEQ ID NO: 614 - protein, 39 aa, Mus musculus; identical to SEQ ID NO: 543

SEQ ID NO: 615 - protein, 35 aa, Mus musculus
SQPHSSTSNQETSDSEMEMEAEHYPNGVLESVSTR

SEQ ID NO: 616 - protein, 44 aa, Mus musculus
SAPASPNHAGVLSAHSSGAQTPESLSREGSPAPLEPEPGASQPK

SEQ ID NO: 617 - protein, 44 aa, Mus musculus; identical to SEQ ID NO: 616

SEQ ID NO: 618 - protein, 32 aa, Mus musculus
SVSETSEDKKDEESDEEEEEEEEEEPLGATTR

SEQ ID NO: 619 - protein, 15 aa, Mus musculus
SNTPSPLNLSSTSSK

SEQ ID NO: 620 - protein, 8 aa, Mus musculus
SEGLSLER

SEQ ID NO: 621 - protein, 27 aa, Mus musculus
SAPASPNHAGVLSAHSSGAQTPESLSR

SEQ ID NO: 622 - protein, 15 aa, Mus musculus
RRSGEQITSSPVSPK

SEQ ID NO: 623 - protein, 37 aa, Mus musculus
SPPVQPHTPVTISLGTAPSLQNNQPVEFNHAINYVNK

SEQ ID NO: 624 - protein, 37 aa, Mus musculus; identical to SEQ ID NO: 623

SEQ ID NO: 625 - protein, 35 aa, Mus musculus; identical to SEQ ID NO: 615

SEQ ID NO: 626 - protein, 20 aa, Mus musculus
TSASCSPAPESPMSSSESVK

SEQ ID NO: 627 - protein, 22 aa, Mus musculus
GRSSESSCGLDGDYEDAELNPR

SEQ ID NO: 628 - protein, 24 aa, Mus musculus
SLVSPIPSPTGTISVPNSCPASPR

SEQ ID NO: 629 - protein, 24 aa, Mus musculus
SLVSPIPSPTGTISVPNSCPASPR

SEQ ID NO: 630 - protein, 21 aa, Mus musculus
MNILSSQSPLHPSTLNAVIHR

SEQ ID NO: 631 - protein, 14 aa, Mus musculus
ERQESESEQELVNK

SEQ ID NO: 632 - protein, 26 aa, Mus musculus
VSALEEDMDDVESSEEEEEEDEKLER

SEQ ID NO: 633 - protein, 32 aa, Mus musculus; identical to SEQ ID NO: 618

SEQ ID NO: 634 - protein, 32 aa, Mus musculus; identical to SEQ ID NO: 618

SEQ ID NO: 635 - protein, 16 aa, Mus musculus
LSSLRASTSKSESSQK

SEQ ID NO: 636 - protein, 30 aa, Mus musculus
HRSNSFSDEREFSAPSTPTGTLEFAGGDAK

SEQ ID NO: 637 - protein, 14 aa, Mus musculus
ERQESESEQELVNK

SEQ ID NO: 638 - protein, 34 aa, Mus musculus; identical to SEQ ID NO: 576

SEQ ID NO: 639 - protein, 15 aa, Mus musculus
SNTPSPLNLSSTSSK

SEQ ID NO: 640 - protein, 24 aa, Mus musculus
SLVSPIPSPTGTISVPNSCPASPR

SEQ ID NO: 641 - protein, 33 aa, Mus musculus
KMLLASTSSDDFDRASYSGTSPSHSFISGEPDR

SEQ ID NO: 642 - protein, 14 aa, Mus musculus
ERQESESEQELVNK

SEQ ID NO: 643 - protein, 24 aa, Mus musculus
SLVSPIPSPTGTISVPNSCPASPR

SEQ ID NO: 644 - protein, 25 aa, Mus musculus
VDTAASSSWLAGSCSPVSPPVVDLR

SEQ ID NO: 645 - protein, 24 aa, Mus musculus
SLVSPIPSPTGTISVPNSCPASPR

SEQ ID NO: 646 - protein, 24 aa, Mus musculus
SLVSPIPSPTGTISVPNSCPASPR

SEQ ID NO: 647 - protein, 24 aa, Mus musculus
SLVSPIPSPTGTISVPNSCPASPR

SEQ ID NO: 648 - protein, 22 aa, Mus musculus
TSDIFGSPVTATAPLAHPNKPK

SEQ ID NO: 649 - protein, 38 aa, Mus musculus
EIDVLEFGESAPAASKENSAAPSPGRPQSASPAKEEQK

SEQ ID NO: 650 - protein, 39 aa, Mus musculus; identical to SEQ ID NO: 543

SEQ ID NO: 651 - protein, 27 aa, Mus musculus
TASISSSPSEGTPAVGSYGCTPQSLPK

SEQ ID NO: 652 - protein, 23 aa, Mus musculus
RSSRSFSLDEPPLFIPDNIATVK

SEQ ID NO: 653 - protein, 12 aa, Mus musculus
YMEDSTYYKASK

SEQ ID NO: 654 - protein, 10 aa, Mus musculus
MMPSPSDSSR

SEQ ID NO: 655 - protein, 23 aa, Mus musculus
VHGLPTTSPSGVNMAELAQQVVK

SEQ ID NO: 656 - protein, 23 aa, Mus musculus
VHGLPTTSPSGVNMAELAQQVVK

SEQ ID NO: 657 - protein, 31 aa, Mus musculus; identical to SEQ ID NO: 348

SEQ ID NO: 658 - protein, 23 aa, Mus musculus
SSRSFSLDEPPLFIPDNIATVKK

SEQ ID NO: 659 - protein, 34 aa, Mus musculus; identical to SEQ ID NO: 576

SEQ ID NO: 660 - protein, 40 aa, Mus musculus
SSISSVLKDPDSNPYSLLDNTESDQTADTDASESHHSTNR

SEQ ID NO: 661 - protein, 28 aa, Mus musculus
TGTGSPFAGNSPAREGEQDAGSLKDVFK

SEQ ID NO: 662 - protein, 28 aa, Mus musculus
TGTGSPFAGNSPAREGEQDAGSLKDVFK

SEQ ID NO: 663 - protein, 17 aa, Mus musculus
EIQNGTLRESDSEHVPR

SEQ ID NO: 664 - protein, 30 aa, Mus musculus
GGGSAAAAAAAAASGGGVSPDNSIEHSDYR

SEQ ID NO: 665 - protein, 29 aa, Mus musculus
SGPLPSSSGSSSSSSQLSVATLGRSPSPK

SEQ ID NO: 666 - protein, 29 aa, Mus musculus
SGPLPSSSGSSSSSSQLSVATLGRSPSPK

SEQ ID NO: 667 - protein, 23 aa, Mus musculus
SSRSFSLDEPPLFIPDNIATVKK

SEQ ID NO: 668 - protein, 24 aa, Mus musculus
TTGNSHWTLEAPFSSSCANLETER

SEQ ID NO: 669 - protein, 14 aa, Mus musculus
ERQESESEQELVNK

SEQ ID NO: 670 - protein, 35 aa, Mus musculus; identical to SEQ ID NO: 615

SEQ ID NO: 671 - protein, 33 aa, Mus musculus; identical to SEQ ID NO: 608

SEQ ID NO: 672 - protein, 8 aa, Mus musculus
LESLNIQR

SEQ ID NO: 673 - protein, 15 aa, Mus musculus
SSEVVLSGDDEDYQR

SEQ ID NO: 674 - protein, 20 aa, Mus musculus
TSSTCSNESLNAGGTPVTPR

SEQ ID NO: 675 - protein, 23 aa, Mus musculus
RSSRSFSLDEPPLFIPDNIATVK

SEQ ID NO: 676 - protein, 23 aa, Mus musculus
RSSRSFSLDEPPLFIPDNIATVK

SEQ ID NO: 677 - protein, 17 aa, Mus musculus
SISTCGPLDKDDPGGQK

SEQ ID NO: 678 - protein, 22 aa, Mus musculus
LGDSELALVCSQRPASLSQSPR

SEQ ID NO: 679 - protein, 18 aa, Mus musculus
SRDATPPVSPINMEDQER

SEQ ID NO: 680 - protein, 12 aa, Mus musculus
TVSASSTGDLPK

SEQ ID NO: 681 - protein, 12 aa, Mus musculus
TVSASSTGDLPK

SEQ ID NO: 682 - protein, 12 aa, Mus musculus
TVSASSTGDLPK

SEQ ID NO: 683 - protein, 20 aa, Mus musculus
TSSTCSNESLNAGGTPVTPR

SEQ ID NO: 684 - protein, 18 aa, Mus musculus
SRTGSESSQTGASATSGR

SEQ ID NO: 685 - protein, 40 aa, Mus musculus; identical to SEQ ID NO: 660

SEQ ID NO: 686 - protein, 10 aa, Mus musculus
KRSEGLSLER

SEQ ID NO: 687 - protein, 25 aa, Mus musculus
GPPDFSSDEEREPTPVLGSGASVGR

SEQ ID NO: 688 - protein, 17 aa, Mus musculus
SATDADMVNSGWLVVGK

SEQ ID NO: 689 - protein, 8 aa, Mus musculus
LESLNIQR

SEQ ID NO: 690 - protein, 12 aa, Mus musculus
TVSASSTGDLPK

SEQ ID NO: 691 - protein, 18 aa, Mus musculus
SRDATPPVSPINMEDQER

SEQ ID NO: 692 - protein, 18 aa, Mus musculus
SRTGSESSQTGASATSGR

SEQ ID NO: 693 - protein, 18 aa, Mus musculus
SRTGSESSQTGASATSGR

SEQ ID NO: 694 - protein, 18 aa, Mus musculus
SRTGSESSQTGASATSGR

SEQ ID NO: 695 - protein, 23 aa, Mus musculus
TSSSETEEKKTEKPLILQPLGSR

SEQ ID NO: 696 - protein, 23 aa, Mus musculus
TSSSETEEKKTEKPLILQPLGSR

SEQ ID NO: 697 - protein, 20 aa, Mus musculus
TSSTCSNESLNAGGTPVTPR

SEQ ID NO: 698 - protein, 18 aa, Mus musculus
SRTGSESSQTGASATSGR

SEQ ID NO: 699 - protein, 18 aa, Mus musculus
SRTGSESSQTGASATSGR

SEQ ID NO: 700 - protein, 31 aa, Mus musculus; identical to SEQ ID NO: 348

SEQ ID NO: 701 - protein, 31 aa, Mus musculus; identical to SEQ ID NO: 348

SEQ ID NO: 702 - protein, 23 aa, Mus musculus
RVSTDLPEGQDVYTAACNSVIHR

SEQ ID NO: 703 - protein, 23 aa, Mus musculus
TSSSETEEKKTEKPLILQPLGSR

SEQ ID NO: 704 - protein, 26 aa, Mus musculus
LGEQGPEPGPTPPQTPTPPSTPPLAK

SEQ ID NO: 705 - protein, 16 aa, Mus musculus
LSSLRASTSKSESSQK

SEQ ID NO: 706 - protein, 27 aa, Mus musculus
TASISSSPSEGTPAVGSYGCTPQSLPK

SEQ ID NO: 707 - protein, 39 aa, Mus musculus
TVSSPIPYTPSPSSSRPISPGLSYASHTVGFTPPTSLTR

SEQ ID NO: 708 - protein, 16 aa, Mus musculus
TGSESSQTGASATSGR

SEQ ID NO: 709 - protein, 16 aa, Mus musculus
TGSESSQTGASATSGR

SEQ ID NO: 710 - protein, 18 aa, Mus musculus
SRDATPPVSPINMEDQER

SEQ ID NO: 711 - protein, 13 aa, Mus musculus
SLPTTVPESPNYR

SEQ ID NO: 712 - protein, 13 aa, Mus musculus
SLPTTVPESPNYR

SEQ ID NO: 713 - protein, 45 aa, Mus musculus
SESSAGICVPLSTSPQVSEAAHIPSKKPVIPVVSSTVLPSTYQIR

SEQ ID NO: 714 - protein, 33 aa, Mus musculus
EREVSVSSVTEEPKLDSSQLPLQTGLDVPATPR

SEQ ID NO: 715 - protein, 13 aa, Mus musculus
SLPTTVPESPNYR

SEQ ID NO: 716 - protein, 13 aa, Mus musculus
SLPTTVPESPNYR

SEQ ID NO: 717 - protein, 13 aa, Mus musculus
SLPTTVPESPNYR

SEQ ID NO: 718 - protein, 13 aa, Mus musculus
SLPTTVPESPNYR

SEQ ID NO: 719 - protein, 28 aa, Mus musculus
TGTGSPFAGNSPAREGEQDAGSLKDVFK

SEQ ID NO: 720 - protein, 16 aa, Mus musculus
TGSESSQTGASATSGR

SEQ ID NO: 721 - protein, 16 aa, Mus musculus
TGSESSQTGASATSGR

SEQ ID NO: 722 - protein, 16 aa, Mus musculus
TGSESSQTGASATSGR

SEQ ID NO: 723 - protein, 28 aa, Mus musculus
TGTGSPFAGNSPAREGEQDAGSLKDVFK

SEQ ID NO: 724 - protein, 21 aa, Mus musculus
GEQGSLAQSQPQPGDKNSWSR

SEQ ID NO: 725 - protein, 17 aa, Mus musculus
THSTSSSIGSGESPFSR

SEQ ID NO: 726 - protein, 28 aa, Mus musculus
GGGASSPAPVVFTVGSPPSGATPPQSTR

SEQ ID NO: 727 - protein, 40 aa, Mus musculus
LKCGSGPVHISGQHLVAVEEDAESEDEDEEDVKLLGMSGK

SEQ ID NO: 728 - protein, 26 aa, Mus musculus
LGEQGPEPGPTPPQTPTPPSTPPLAK

SEQ ID NO: 729 - protein, 39 aa, Mus musculus
QFIAAQNLGPASGLPTPTSSPSSSSLPSPLSPTPRPFGR

SEQ ID NO: 730 - protein, 28 aa, Mus musculus
GGGASSPAPVVFTVGSPPSGATPPQSTR

SEQ ID NO: 731 - protein, 27 aa, Mus musculus
TASISSSPSEGTPAVGSYGCTPQSLPK

SEQ ID NO: 732 - protein, 12 aa, Mus musculus
STSPIIGSPPVR

SEQ ID NO: 733 - protein, 27 aa, Mus musculus
TASISSSPSEGTPAVGSYGCTPQSLPK

SEQ ID NO: 734 - protein, 22 aa, Mus musculus
TSDIFGSPVTATAPLAHPNKPK

SEQ ID NO: 735 - protein, 19 aa, Mus musculus
CSPVPGLSSSPSGSPLHGK

SEQ ID NO: 736 - protein, 17 aa, Mus musculus
THSTSSSIGSGESPFSR

SEQ ID NO: 737 - protein, 17 aa, Mus musculus
THSTSSSIGSGESPFSR

SEQ ID NO: 738 - protein, 22 aa, Mus musculus
LSESPASLPSCLPVETALINQR

SEQ ID NO: 739 - protein, 28 aa, Mus musculus
GCSPPKSPEKPPQSTSSESCPPSPQPTK

SEQ ID NO: 740 - protein, 33 aa, Mus musculus; identical to SEQ ID NO: 714

SEQ ID NO: 741 - protein, 26 aa, Mus musculus
GLNLDGTPALSTLGGFSPASKPSSPR

SEQ ID NO: 742 - protein, 26 aa, Mus musculus
GLNLDGTPALSTLGGFSPASKPSSPR

SEQ ID NO: 743 - protein, 26 aa, Mus musculus
GLNLDGTPALSTLGGFSPASKPSSPR

SEQ ID NO: 744 - protein, 26 aa, Mus musculus
GLNLDGTPALSTLGGFSPASKPSSPR

SEQ ID NO: 745 - protein, 26 aa, Mus musculus
GLNLDGTPALSTLGGFSPASKPSSPR

SEQ ID NO: 746 - protein, 18 aa, Mus musculus
SRDATPPVSPINMEDQER

SEQ ID NO: 747 - protein, 26 aa, Mus musculus
GLNLDGTPALSTLGGFSPASKPSSPR

SEQ ID NO: 748 - protein, 19 aa, Mus musculus
LVIGSLPAHLSPHLFGGFK

SEQ ID NO: 749 - protein, 13 aa, Mus musculus
RSSSELSPEVVEK

SEQ ID NO: 750 - protein, 12 aa, Mus musculus
STSPIIGSPPVR

SEQ ID NO: 751 - protein, 42 aa, Mus musculus; identical to SEQ ID NO: 195

SEQ ID NO: 752 - protein, 44 aa, Mus musculus; identical to SEQ ID NO: 616

SEQ ID NO: 753 - protein, 17 aa, Mus musculus
THSTSSSIGSGESPFSR

SEQ ID NO: 754 - protein, 22 aa, Mus musculus
SSSGSEHSTEGSVSLGDGPLSR

SEQ ID NO: 755 - protein, 31 aa, Mus musculus; identical to SEQ ID NO: 348

SEQ ID NO: 756 - protein, 31 aa, Mus musculus; identical to SEQ ID NO: 348

SEQ ID NO: 757 - protein, 26 aa, Mus musculus
AGTTVPESIHSFIGDGLVKPEALNKK

SEQ ID NO: 758 - protein, 23 aa, Mus musculus
VHGLPTTSPSGVNMAELAQQVVK

SEQ ID NO: 759 - protein, 21 aa, Mus musculus
TTSFAESCKPVQQPSAFGSMK

SEQ ID NO: 760 - protein, 21 aa, Mus musculus
TTSFAESCKPVQQPSAFGSMK

SEQ ID NO: 761 - protein, 32 aa, Mus musculus
SQDSYPVSPRPFSSPSMSPSHGMSIHSLAPGK

SEQ ID NO: 762 - protein, 21 aa, Mus musculus
TDNSVASSPSSAISTATPSPK

SEQ ID NO: 763 - protein, 23 aa, Mus musculus
GHPSAGAEEEGGSDGSAAEAEPR

SEQ ID NO: 764 - protein, 17 aa, Mus musculus
THSTSSSIGSGESPFSR

SEQ ID NO: 765 - protein, 17 aa, Mus musculus
THSTSSSIGSGESPFSR

SEQ ID NO: 766 - protein, 28 aa, Mus musculus
GCSPPKSPEKPPQSTSSESCPPSPQPTK

SEQ ID NO: 767 - protein, 13 aa, Mus musculus
VLASSLSPYREGR

SEQ ID NO: 768 - protein, 17 aa, Mus musculus
THSTSSSIGSGESPFSR

SEQ ID NO: 769 - protein, 9 aa, Mus musculus
RSESPFEGK

SEQ ID NO: 770 - protein, 17 aa, Mus musculus
THSTSSSIGSGESPFSR

SEQ ID NO: 771 - protein, 19 aa, Mus musculus
CSPVPGLSSSPSGSPLHGK

SEQ ID NO: 772 - protein, 43 aa, Mus musculus
GYPPPIAAKPAFGRPILKPSTPVPMPESEEVGESTEEQEDAPR

SEQ ID NO: 773 - protein, 28 aa, Mus musculus
GCSPPKSPEKPPQSTSSESCPPSPQPTK

SEQ ID NO: 774 - protein, 28 aa, Mus musculus
GCSPPKSPEKPPQSTSSESCPPSPQPTK

SEQ ID NO: 775 - protein, 44 aa, Mus musculus; identical to SEQ ID NO: 616

SEQ ID NO: 776 - protein, 17 aa, Mus musculus
THSTSSSIGSGESPFSR

SEQ ID NO: 777 - protein, 22 aa, Mus musculus
TSDIFGSPVTATAPLAHPNKPK

SEQ ID NO: 778 - protein, 17 aa, Mus musculus
THSTSSSIGSGESPFSR

SEQ ID NO: 779 - protein, 17 aa, Mus musculus
THSTSSSIGSGESPFSR

SEQ ID NO: 780 - protein, 9 aa, Mus musculus
RSESPFEGK

SEQ ID NO: 781 - protein, 9 aa, Mus musculus
RSESPFEGK

SEQ ID NO: 782 - protein, 17 aa, Mus musculus
THSTSSSIGSGESPFSR

SEQ ID NO: 783 - protein, 17 aa, Mus musculus
THSTSSSIGSGESPFSR

SEQ ID NO: 784 - protein, 36 aa, Mus musculus
VALGDGVQLPPGDYSTTPGGTLFSTTPGGTRIIYDR

SEQ ID NO: 785 - protein, 40 aa, Mus musculus
RLAAQESSEAEDVTVDRGPVAQLSSSPVLPNGHQPLLQPR

SEQ ID NO: 786 - protein, 18 aa, Mus musculus
TEMDKSPFNSPSPQDSPR

SEQ ID NO: 787 - protein, 28 aa, Mus musculus
GCSPPKSPEKPPQSTSSESCPPSPQPTK

SEQ ID NO: 788 - protein, 28 aa, Mus musculus
GCSPPKSPEKPPQSTSSESCPPSPQPTK

SEQ ID NO: 789 - protein, 28 aa, Mus musculus
GCSPPKSPEKPPQSTSSESCPPSPQPTK

SEQ ID NO: 790 - protein, 26 aa, Mus musculus
GLNLDGTPALSTLGGFSPASKPSSPR

SEQ ID NO: 791 - protein, 22 aa, Mus musculus
TSDIFGSPVTATAPLAHPNKPK

SEQ ID NO: 792 - protein, 14 aa, Mus musculus
RLSSTSLASGHSVR

SEQ ID NO: 793 - protein, 13 aa, Mus musculus
RSSSELSPEVVEK

SEQ ID NO: 794 - protein, 13 aa, Mus musculus
RSSSELSPEVVEK

SEQ ID NO: 795 - protein, 13 aa, Mus musculus
RSSSELSPEVVEK

SEQ ID NO: 796 - protein, 13 aa, Mus musculus
RSSSELSPEVVEK

SEQ ID NO: 797 - protein, 30 aa, Mus musculus
SEGLSQEATPSQDLIQHSCSPVDHSEPEAR

SEQ ID NO: 798 - protein, 19 aa, Mus musculus
LVIGSLPAHLSPHLFGGFK

SEQ ID NO: 799 - protein, 19 aa, Mus musculus
LVIGSLPAHLSPHLFGGFK

SEQ ID NO: 800 - protein, 45 aa, Mus musculus
DLQSEFGVATDSHHSSFGSSSWSQDTSQNYSLGGRSPVGDTGLGK

SEQ ID NO: 801 - protein, 33 aa, Mus musculus
LTSHTPGLDDEKEASENETDIEDPREIQADSWR

SEQ ID NO: 802 - protein, 17 aa, Mus musculus
THSTSSSIGSGESPFSR

SEQ ID NO: 803 - protein, 17 aa, Mus musculus
THSTSSSIGSGESPFSR

SEQ ID NO: 804 - protein, 23 aa, Mus musculus
QGGRCSPVPGLSSSPSGSPLHGK

SEQ ID NO: 805 - protein, 23 aa, Mus musculus
QGGRCSPVPGLSSSPSGSPLHGK

SEQ ID NO: 806 - protein, 14 aa, Mus musculus
LQESPKLSQANGTR

SEQ ID NO: 807 - protein, 23 aa, Mus musculus
VMTIPYQPMPASSPVICAGGQDR

SEQ ID NO: 808 - protein, 27 aa, Mus musculus
LVIPSATTKSPPEITVTPPTPTLLSPK

SEQ ID NO: 809 - protein, 30 aa, Mus musculus
SACFSPVSLSPRPCSPFSTPPPTSPVALSK

SEQ ID NO: 810 - protein, 19 aa, Mus musculus
LVIGSLPAHLSPHLFGGFK

SEQ ID NO: 811 - protein, 19 aa, Mus musculus
LVIGSLPAHLSPHLFGGFK

SEQ ID NO: 812 - protein, 18 aa, Mus musculus
SRTGSESSQTGASATSGR

SEQ ID NO: 813 - protein, 42 aa, Mus musculus; identical to SEQ ID NO: 140

SEQ ID NO: 814 - protein, 25 aa, Mus musculus
NKPLSPIKLTPTSVLDYFGTESVQR

SEQ ID NO: 815 - protein, 13 aa, Mus musculus
RSSSELSPEVVEK

SEQ ID NO: 816 - protein, 13 aa, Mus musculus
RSSSELSPEVVEK

SEQ ID NO: 817 - protein, 13 aa, Mus musculus
RSSSELSPEVVEK

SEQ ID NO: 818 - protein, 13 aa, Mus musculus
RSSSELSPEVVEK

SEQ ID NO: 819 - protein, 13 aa, Mus musculus
RSSSELSPEVVEK

SEQ ID NO: 820 - protein, 13 aa, Mus musculus
RSSSELSPEVVEK

SEQ ID NO: 821 - protein, 22 aa, Mus musculus
SSSGSEHSTEGSVSLGDGPLSR

SEQ ID NO: 822 - protein, 13 aa, Mus musculus
RSTSPIIGSPPVR

SEQ ID NO: 823 - protein, 13 aa, Mus musculus
RSTSPIIGSPPVR

SEQ ID NO: 824 - protein, 20 aa, Mus musculus
AESPETSAVESTQSTPQKGR

SEQ ID NO: 825 - protein, 20 aa, Mus musculus
AESPETSAVESTQSTPQKGR

SEQ ID NO: 826 - protein, 14 aa, Mus musculus
ASLYNAVTTEDVEK

SEQ ID NO: 827 - protein, 20 aa, Mus musculus
TFSECSYPETEEEAEALPGR

SEQ ID NO: 828 - protein, 9 aa, Mus musculus
SFSKEVEER

SEQ ID NO: 829 - protein, 28 aa, Mus musculus
GCSPPKSPEKPPQSTSSESCPPSPQPTK

SEQ ID NO: 830 - protein, 29 aa, Mus musculus
AAPSSEGDSCDGVEATDAEEPGGNIVATK

SEQ ID NO: 831 - protein, 19 aa, Mus musculus
KLEKEEEEGISQESSEEEQ

SEQ ID NO: 832 - protein, 19 aa, Mus musculus
LDTFCGSPPYAAPELFQGK

SEQ ID NO: 833 - protein, 21 aa, Mus musculus
TTSFAESCKPVQQPSAFGSMK

SEQ ID NO: 834 - protein, 26 aa, Mus musculus
LGEQGPEPGPTPPQTPTPPSTPPLAK

SEQ ID NO: 835 - protein, 20 aa, Mus musculus
TSSVSSLASACTGGIPSSSR

SEQ ID NO: 836 - protein, 13 aa, Mus musculus
TTPLASPSLSPGR

SEQ ID NO: 837 - protein, 21 aa, Mus musculus
TTSFAESCKPVQQPSAFGSMK

SEQ ID NO: 838 - protein, 13 aa, Mus musculus
KRSPSPSPTPEAK

SEQ ID NO: 839 - protein, 19 aa, Mus musculus
LDTFCGSPPYAAPELFQGK

SEQ ID NO: 840 - protein, 19 aa, Mus musculus
LDTFCGSPPYAAPELFQGK

SEQ ID NO: 841 - protein, 17 aa, Mus musculus
THSTSSSIGSGESPFSR

SEQ ID NO: 842 - protein, 17 aa, Mus musculus
THSTSSSIGSGESPFSR

SEQ ID NO: 843 - protein, 23 aa, Mus musculus
VMTIPYQPMPASSPVICAGGQDR

SEQ ID NO: 844 - protein, 11 aa, Mus musculus
SSSPVTELTAR

SEQ ID NO: 845 - protein, 9 aa, Mus musculus
SFSKEVEER

SEQ ID NO: 846 - protein, 9 aa, Mus musculus
SFSKEVEER

SEQ ID NO: 847 - protein, 9 aa, Mus musculus
SFSKEVEER

SEQ ID NO: 848 - protein, 9 aa, Mus musculus
SFSKEVEER

SEQ ID NO: 849 - protein, 24 aa, Mus musculus
HSLSSESQAPEDIAPPGSSPHANR

SEQ ID NO: 850 - protein, 22 aa, Mus musculus
SSSGSEHSTEGSVSLGDGPLSR

SEQ ID NO: 851 - protein, 17 aa, Mus musculus
THSTSSSIGSGESPFSR

SEQ ID NO: 852 - protein, 19 aa, Mus musculus
LDTFCGSPPYAAPELFQGK

SEQ ID NO: 853 - protein, 26 aa, Mus musculus
GLNLDGTPALSTLGGFSPASKPSSPR

SEQ ID NO: 854 - protein, 12 aa, Mus musculus
LVVSSPTSPKGK

SEQ ID NO: 855 - protein, 20 aa, Mus musculus
TFSECSYPETEEEAEALPGR

SEQ ID NO: 856 - protein, 13 aa, Mus musculus
TTPLASPSLSPGR

SEQ ID NO: 857 - protein, 12 aa, Mus musculus
LVVSSPTSPKGK

SEQ ID NO: 858 - protein, 9 aa, Mus musculus
SFSKEVEER

SEQ ID NO: 859 - protein, 9 aa, Mus musculus
SFSKEVEER

SEQ ID NO: 860 - protein, 26 aa, Mus musculus
LFGTSPAAEVTPSPPEPAPALEAPAR

SEQ ID NO: 861 - protein, 17 aa, Mus musculus
KETESEAEDDNLDDLER

SEQ ID NO: 862 - protein, 34 aa, Mus musculus
KEELGASSPGYGPPNLGCVDSPSAGPHLGGLELK

SEQ ID NO: 863 - protein, 9 aa, Mus musculus
SFSKEVEER

SEQ ID NO: 864 - protein, 9 aa, Mus musculus
SFSKEVEER

SEQ ID NO: 865 - protein, 9 aa, Mus musculus
SFSKEVEER

SEQ ID NO: 866 - protein, 9 aa, Mus musculus
SFSKEVEER

SEQ ID NO: 867 - protein, 40 aa, Mus musculus
YEENPAWPGTSTHNGPNGFSQIMDETPNVSKSSPTGFGIK

SEQ ID NO: 868 - protein, 42 aa, Mus musculus; identical to SEQ ID NO: 140

SEQ ID NO: 869 - protein, 42 aa, Mus musculus; identical to SEQ ID NO: 140

SEQ ID NO: 870 - protein, 42 aa, Mus musculus; identical to SEQ ID NO: 140

SEQ ID NO: 871 - protein, 42 aa, Mus musculus; identical to SEQ ID NO: 140

SEQ ID NO: 872 - protein, 42 aa, Mus musculus; identical to SEQ ID NO: 140

SEQ ID NO: 873 - protein, 30 aa, Mus musculus
SFGDKDLILPNGGTPAGTASPASSSSLLNR

SEQ ID NO: 874 - protein, 18 aa, Mus musculus
WAAHGTSPEDFSLTLGAR

SEQ ID NO: 875 - protein, 12 aa, Mus musculus
LVVSSPTSPKGK

SEQ ID NO: 876 - protein, 12 aa, Mus musculus
LVVSSPTSPKGK

SEQ ID NO: 877 - protein, 22 aa, Mus musculus
FIGSPRTPVSPVKFSPGDFWGR

SEQ ID NO: 878 - protein, 17 aa, Mus musculus
THSTSSSIGSGESPFSR

SEQ ID NO: 879 - protein, 17 aa, Mus musculus
THSTSSSIGSGESPFSR

SEQ ID NO: 880 - protein, 20 aa, Mus musculus
AESPETSAVESTQSTPQKGR

SEQ ID NO: 881 - protein, 20 aa, Mus musculus
AESPETSAVESTQSTPQKGR

SEQ ID NO: 882 - protein, 22 aa, Mus musculus
FIGSPRTPVSPVKFSPGDFWGR

SEQ ID NO: 883 - protein, 22 aa, Mus musculus
FIGSPRTPVSPVKFSPGDFWGR

SEQ ID NO: 884 - protein, 22 aa, Mus musculus
FIGSPRTPVSPVKFSPGDFWGR

SEQ ID NO: 885 - protein, 20 aa, Mus musculus
TSSVSSLASACTGGIPSSSR

SEQ ID NO: 886 - protein, 20 aa, Mus musculus
TSSVSSLASACTGGIPSSSR

SEQ ID NO: 887 - protein, 42 aa, Mus musculus; identical to SEQ ID NO: 140

SEQ ID NO: 888 - protein, 20 aa, Mus musculus
AESPETSAVESTQSTPQKGR

SEQ ID NO: 889 - protein, 20 aa, Mus musculus
AESPETSAVESTQSTPQKGR

SEQ ID NO: 890 - protein, 20 aa, Mus musculus
AESPETSAVESTQSTPQKGR

SEQ ID NO: 891 - protein, 19 aa, Mus musculus
SRTHSTSSSIGSGESPFSR

SEQ ID NO: 892 - protein, 26 aa, Mus musculus
KPPAPPSPVQSQSPSTNWSPAVPAKK

SEQ ID NO: 893 - protein, 18 aa, Mus musculus
TISAQDTLAYATALLNEK

SEQ ID NO: 894 - protein, 15 aa, Mus musculus
SLHPWYGITPTSSPK

SEQ ID NO: 895 - protein, 22 aa, Mus musculus
SSSGSEHSTEGSVSLGDGPLSR

SEQ ID NO: 896 - protein, 22 aa, Mus musculus
SYQNSPSSEDGIRPLPEYSTEK

SEQ ID NO: 897 - protein, 22 aa, Mus musculus
SYQNSPSSEDGIRPLPEYSTEK

SEQ ID NO: 898 - protein, 23 aa, Mus musculus
ATSRPINLGPSSPNTEIHWTPYR

SEQ ID NO: 899 - protein, 19 aa, Mus musculus
ASYSGTSPSHSFISGEPDR

SEQ ID NO: 900 - protein, 15 aa, Mus musculus
TRLASESANDDNEDS

SEQ ID NO: 901 - protein, 12 aa, Mus musculus
STSPIIGSPPVR

SEQ ID NO: 902 - protein, 12 aa, Mus musculus
STSPIIGSPPVR

SEQ ID NO: 903 - protein, 12 aa, Mus musculus
STSPIIGSPPVR

SEQ ID NO: 904 - protein, 12 aa, Mus musculus
STSPIIGSPPVR

SEQ ID NO: 905 - protein, 42 aa, Mus musculus; identical to SEQ ID NO: 140

SEQ ID NO: 906 - protein, 42 aa, Mus musculus; identical to SEQ ID NO: 140

SEQ ID NO: 907 - protein, 31 aa, Mus musculus
RPYTGNPQYTYNNWSPPVQSNETSNGYFLER

SEQ ID NO: 908 - protein, 31 aa, Mus musculus; identical to SEQ ID NO: 907

SEQ ID NO: 909 - protein, 12 aa, Mus musculus
STSPIIGSPPVR

SEQ ID NO: 910 - protein, 12 aa, Mus musculus
STSPIIGSPPVR

SEQ ID NO: 911 - protein, 23 aa, Mus musculus
DTVIIVSEPSEDEESHDLPSVTR

SEQ ID NO: 912 - protein, 42 aa, Mus musculus; identical to SEQ ID NO: 140

SEQ ID NO: 913 - protein, 28 aa, Mus musculus
GGGASSPAPVVFTVGSPPSGATPPQSTR

SEQ ID NO: 914 - protein, 28 aa, Mus musculus
GGGASSPAPVVFTVGSPPSGATPPQSTR

SEQ ID NO: 915 - protein, 28 aa, Mus musculus
GGGASSPAPVVFTVGSPPSGATPPQSTR

SEQ ID NO: 916 - protein, 19 aa, Mus musculus
ASYSGTSPSHSFISGEPDR

SEQ ID NO: 917 - protein, 19 aa, Mus musculus
ASYSGTSPSHSFISGEPDR

SEQ ID NO: 918 - protein, 19 aa, Mus musculus
ASYSGTSPSHSFISGEPDR

SEQ ID NO: 919 - protein, 37 aa, Mus musculus; identical to SEQ ID NO: 623

SEQ ID NO: 920 - protein, 12 aa, Mus musculus
STSPIIGSPPVR

SEQ ID NO: 921 - protein, 12 aa, Mus musculus
STSPIIGSPPVR

SEQ ID NO: 922 - protein, 30 aa, Mus musculus
VHHSVQTFQEDSLPVAHSLQEVSEPLTAAR

SEQ ID NO: 923 - protein, 30 aa, Mus musculus; identical to SEQ ID NO: 922

SEQ ID NO: 924 - protein, 41 aa, Mus musculus
FHHNSLEVLSTVSPLGSGPPSPDVTGCKDPLEDVSADVTQK

SEQ ID NO: 925 - protein, 12 aa, Mus musculus
STSPIIGSPPVR

SEQ ID NO: 926 - protein, 12 aa, Mus musculus
STSPIIGSPPVR

SEQ ID NO: 927 - protein, 12 aa, Mus musculus
STSPIIGSPPVR

SEQ ID NO: 928 - protein, 12 aa, Mus musculus
STSPIIGSPPVR

SEQ ID NO: 929 - protein, 13 aa, Mus musculus
RSTSPIIGSPPVR

SEQ ID NO: 930 - protein, 10 aa, Mus musculus
LVVSSPTSPK

SEQ ID NO: 931 - protein, 21 aa, Mus musculus
HSSISPVRLPLNSSLGAELSR

SEQ ID NO: 932 - protein, 23 aa, Mus musculus
ATSRPINLGPSSPNTEIHWTPYR

SEQ ID NO: 933 - protein, 14 aa, Mus musculus
LQESPKLSQANGTR

SEQ ID NO: 934 - protein, 26 aa, Mus musculus
LGEQGPEPGPTPPQTPTPPSTPPLAK

SEQ ID NO: 935 - protein, 39 aa, Mus musculus; identical to SEQ ID NO: 707

SEQ ID NO: 936 - protein, 19 aa, Mus musculus
ASYSGTSPSHSFISGEPDR

SEQ ID NO: 937 - protein, 25 aa, Mus musculus
VDTAASSSWLAGSCSPVSPPVVDLR

SEQ ID NO: 938 - protein, 13 aa, Mus musculus
RSTSPIIGSPPVR

SEQ ID NO: 939 - protein, 13 aa, Mus musculus
RSTSPIIGSPPVR

SEQ ID NO: 940 - protein, 13 aa, Mus musculus
RSTSPIIGSPPVR

SEQ ID NO: 941 - protein, 13 aa, Mus musculus
RSTSPIIGSPPVR

SEQ ID NO: 942 - protein, 13 aa, Mus musculus
RSTSPIIGSPPVR

SEQ ID NO: 943 - protein, 13 aa, Mus musculus
RSTSPIIGSPPVR

SEQ ID NO: 944 - protein, 13 aa, Mus musculus
RSTSPIIGSPPVR

SEQ ID NO: 945 - protein, 6 aa, Mus musculus
STSSPK

SEQ ID NO: 946 - protein, 23 aa, Mus musculus
ATSRPINLGPSSPNTEIHWTPYR

SEQ ID NO: 947 - protein, 23 aa, Mus musculus
ATSRPINLGPSSPNTEIHWTPYR

SEQ ID NO: 948 - protein, 15 aa, Mus musculus
TRLASESANDDNEDS

SEQ ID NO: 949 - protein, 22 aa, Mus musculus
SYQNSPSSEDGIRPLPEYSTEK

SEQ ID NO: 950 - protein, 22 aa, Mus musculus
SYQNSPSSEDGIRPLPEYSTEK

SEQ ID NO: 951 - protein, 22 aa, Mus musculus
SYQNSPSSEDGIRPLPEYSTEK

SEQ ID NO: 952 - protein, 19 aa, Mus musculus
ASYSGTSPSHSFISGEPDR

SEQ ID NO: 953 - protein, 19 aa, Mus musculus
ASYSGTSPSHSFISGEPDR

SEQ ID NO: 954 - protein, 19 aa, Mus musculus
ASYSGTSPSHSFISGEPDR

SEQ ID NO: 955 - protein, 20 aa, Mus musculus
GTSRPGTPSAEAASTSSTLR

SEQ ID NO: 956 - protein, 20 aa, Mus musculus
GTSRPGTPSAEAASTSSTLR

SEQ ID NO: 957 - protein, 37 aa, Mus musculus
VALGDGVQLPPGDYSTTPGGTLFSTTPGGTRIIYDRK

SEQ ID NO: 958 - protein, 18 aa, Mus musculus
SRTGSESSQTGASATSGR

SEQ ID NO: 959 - protein, 24 aa, Mus musculus
TTEAPCSPGSQQPPSPDELPANVK

SEQ ID NO: 960 - protein, 24 aa, Mus musculus
TTEAPCSPGSQQPPSPDELPANVK

SEQ ID NO: 961 - protein, 24 aa, Mus musculus
TTEAPCSPGSQQPPSPDELPANVK

SEQ ID NO: 962 - protein, 26 aa, Mus musculus
LGEQGPEPGPTPPQTPTPPSTPPLAK

SEQ ID NO: 963 - protein, 39 aa, Mus musculus; identical to SEQ ID NO: 707

SEQ ID NO: 964 - protein, 39 aa, Mus musculus; identical to SEQ ID NO: 707

SEQ ID NO: 965 - protein, 39 aa, Mus musculus; identical to SEQ ID NO: 707

SEQ ID NO: 966 - protein, 13 aa, Mus musculus
RSTSPIIGSPPVR

SEQ ID NO: 967 - protein, 26 aa, Mus musculus
GLNLDGTPALSTLGGFSPASKPSSPR

SEQ ID NO: 968 - protein, 26 aa, Mus musculus
GLNLDGTPALSTLGGFSPASKPSSPR

SEQ ID NO: 969 - protein, 13 aa, Mus musculus
RSTSPIIGSPPVR

SEQ ID NO: 970 - protein, 13 aa, Mus musculus
RSTSPIIGSPPVR

SEQ ID NO: 971 - protein, 13 aa, Mus musculus
RSTSPIIGSPPVR

SEQ ID NO: 972 - protein, 13 aa, Mus musculus
RSTSPIIGSPPVR

SEQ ID NO: 973 - protein, 13 aa, Mus musculus
RSTSPIIGSPPVR

SEQ ID NO: 974 - protein, 13 aa, Mus musculus
RSTSPIIGSPPVR

SEQ ID NO: 975 - protein, 13 aa, Mus musculus
RSTSPIIGSPPVR

SEQ ID NO: 976 - protein, 23 aa, Mus musculus
ATSRPINLGPSSPNTEIHWTPYR

SEQ ID NO: 977 - protein, 42 aa, Mus musculus; identical to SEQ ID NO: 140

SEQ ID NO: 978 - protein, 24 aa, Mus musculus
HSLSSESQAPEDIAPPGSSPHANR

SEQ ID NO: 979 - protein, 39 aa, Mus musculus; identical to SEQ ID NO: 707

SEQ ID NO: 980 - protein, 39 aa, Mus musculus; identical to SEQ ID NO: 707

SEQ ID NO: 981 - protein, 39 aa, Mus musculus; identical to SEQ ID NO: 707

SEQ ID NO: 982 - protein, 39 aa, Mus musculus; identical to SEQ ID NO: 707

SEQ ID NO: 983 - protein, 39 aa, Mus musculus
YAQGFLPEKPPQQDHTTTTDSEMEEPYLQESKEEGTPLK

SEQ ID NO: 984 - protein, 14 aa, Mus musculus
RLSSTSLASGHSVR

SEQ ID NO: 985 - protein, 31 aa, Mus musculus; identical to SEQ ID NO: 153

SEQ ID NO: 986 - protein, 24 aa, Mus musculus
SSSLGNSPDRGPLRPFVPEQELLR

SEQ ID NO: 987 - protein, 13 aa, Mus musculus
LFSQGQDVSDKVK

SEQ ID NO: 988 - protein, 43 aa, Mus musculus
VSSPSCDSQGLHPEEAPSSEPQSPVAQTLGWPACSTPLPLVSR

SEQ ID NO: 989 - protein, 11 aa, Mus musculus
SLSESSVVMDR

SEQ ID NO: 990 - protein, 20 aa, Mus musculus
HLEDAGSTPSIGENDLKFPK

SEQ ID NO: 991 - protein, 37 aa, Mus musculus; identical to SEQ ID NO: 137

SEQ ID NO: 992 - protein, 37 aa, Mus musculus; identical to SEQ ID NO: 137

SEQ ID NO: 993 - protein, 28 aa, Mus musculus
RANTLSHFPVECPAPPEPAQSSPGVSQR

SEQ ID NO: 994 - protein, 24 aa, Mus musculus
TTEAPCSPGSQQPPSPDELPANVK

SEQ ID NO: 995 - protein, 24 aa, Mus musculus
TTEAPCSPGSQQPPSPDELPANVK

SEQ ID NO: 996 - protein, 24 aa, Mus musculus
TTEAPCSPGSQQPPSPDELPANVK

SEQ ID NO: 997 - protein, 37 aa, Mus musculus; identical to SEQ ID NO: 137

SEQ ID NO: 998 - protein, 33 aa, Mus musculus
SQSVPGAWPGASPLSSQPLLGSSRQSHPLTQSR

SEQ ID NO: 999 - protein, 36 aa, Mus musculus
KQTPPASPSPQPIEDRPPSSPIYEDAAPFKAEPSYR

SEQ ID NO: 1000 - protein, 19 aa, Mus musculus
ASYSGTSPSHSFISGEPDR

SEQ ID NO: 1001 - protein, 19 aa, Mus musculus
ASYSGTSPSHSFISGEPDR

SEQ ID NO: 1002 - protein, 39 aa, Mus musculus
GATEEEQQDSGSEPRGDEDDIPLGPQSNVSLLDQHQHLK

SEQ ID NO: 1003 - protein, 20 aa, Mus musculus
GTSRPGTPSAEAASTSSTLR

SEQ ID NO: 1004 - protein, 20 aa, Mus musculus
GTSRPGTPSAEAASTSSTLR

SEQ ID NO: 1005 - protein, 20 aa, Mus musculus
GTSRPGTPSAEAASTSSTLR

SEQ ID NO: 1006 - protein, 17 aa, Mus musculus
RGSGDTSISMDTEASIR

SEQ ID NO: 1007 - protein, 27 aa, Mus musculus
LYSLLGIDLTAPSNNSSPRDSPCKENK

SEQ ID NO: 1008 - protein, 42 aa, Mus musculus; identical to SEQ ID NO: 140

SEQ ID NO: 1009 - protein, 15 aa, Mus musculus
TRLASESANDDNEDS

SEQ ID NO: 1010 - protein, 15 aa, Mus musculus
TRLASESANDDNEDS

SEQ ID NO: 1011 - protein, 27 aa, Mus musculus
RCPSQSSSRPATGISQPPTTPTGQATR

SEQ ID NO: 1012 - protein, 26 aa, Mus musculus
LGEQGPEPGPTPPQTPTPPSTPPLAK

SEQ ID NO: 1013 - protein, 21 aa, Mus musculus
SIEDLQPPNALSAPFTNSLAR

SEQ ID NO: 1014 - protein, 20 aa, Mus musculus
GTSRPGTPSAEAASTSSTLR

SEQ ID NO: 1015 - protein, 20 aa, Mus musculus
GTSRPGTPSAEAASTSSTLR

SEQ ID NO: 1016 - protein, 20 aa, Mus musculus
GTSRPGTPSAEAASTSSTLR

SEQ ID NO: 1017 - protein, 20 aa, Mus musculus
GTSRPGTPSAEAASTSSTLR

SEQ ID NO: 1018 - protein, 26 aa, Mus musculus
LGEQGPEPGPTPPQTPTPPSTPPLAK

SEQ ID NO: 1019 - protein, 19 aa, Mus musculus
ASYSGTSPSHSFISGEPDR

SEQ ID NO: 1020 - protein, 19 aa, Mus musculus
ASYSGTSPSHSFISGEPDR

SEQ ID NO: 1021 - protein, 19 aa, Mus musculus
ASYSGTSPSHSFISGEPDR

SEQ ID NO: 1022 - protein, 21 aa, Mus musculus
SDELLGDLTRTPPSSSAAFLK

SEQ ID NO: 1023 - protein, 21 aa, Mus musculus
SDELLGDLTRTPPSSSAAFLK

SEQ ID NO: 1024 - protein, 20 aa, Mus musculus
TASEGSEAETPEAPKQPAKK

SEQ ID NO: 1025 - protein, 20 aa, Mus musculus
TASEGSEAETPEAPKQPAKK

SEQ ID NO: 1026 - protein, 23 aa, Mus musculus
ATSRPINLGPSSPNTEIHWTPYR

SEQ ID NO: 1027 - protein, 23 aa, Mus musculus
ATSRPINLGPSSPNTEIHWTPYR

SEQ ID NO: 1028 - protein, 23 aa, Mus musculus
ATSRPINLGPSSPNTEIHWTPYR

SEQ ID NO: 1029 - protein, 39 aa, Mus musculus; identical to SEQ ID NO: 707

SEQ ID NO: 1030 - protein, 20 aa, Mus musculus
GTSRPGTPSAEAASTSSTLR

SEQ ID NO: 1031 - protein, 20 aa, Mus musculus
GTSRPGTPSAEAASTSSTLR

SEQ ID NO: 1032 - protein, 20 aa, Mus musculus
GTSRPGTPSAEAASTSSTLR

SEQ ID NO: 1033 - protein, 20 aa, Mus musculus
GTSRPGTPSAEAASTSSTLR

SEQ ID NO: 1034 - protein, 40 aa, Mus musculus; identical to SEQ ID NO: 867

SEQ ID NO: 1035 - protein, 16 aa, Mus musculus
GSLSRSSSPVTELTAR

SEQ ID NO: 1036 - protein, 12 aa, Mus musculus
SLPVSVPVWAFK

SEQ ID NO: 1037 - protein, 12 aa, Mus musculus
SLPVSVPVWAFK

SEQ ID NO: 1038 - protein, 12 aa, Mus musculus
SLPVSVPVWAFK

SEQ ID NO: 1039 - protein, 16 aa, Mus musculus
GSLSRSSSPVTELTAR

SEQ ID NO: 1040 - protein, 16 aa, Mus musculus
GSLSRSSSPVTELTAR

SEQ ID NO: 1041 - protein, 13 aa, Mus musculus
SLPTTVPESPNYR

SEQ ID NO: 1042 - protein, 13 aa, Mus musculus
SLPTTVPESPNYR

SEQ ID NO: 1043 - protein, 15 aa, Mus musculus
TRLASESANDDNEDS

SEQ ID NO: 1044 - protein, 15 aa, Mus musculus
TRLASESANDDNEDS

SEQ ID NO: 1045 - protein, 15 aa, Mus musculus
TRLASESANDDNEDS

SEQ ID NO: 1046 - protein, 15 aa, Mus musculus
TRLASESANDDNEDS

SEQ ID NO: 1047 - protein, 34 aa, Mus musculus; identical to SEQ ID NO: 192

SEQ ID NO: 1048 - protein, 34 aa, Mus musculus; identical to SEQ ID NO: 192

SEQ ID NO: 1049 - protein, 34 aa, Mus musculus; identical to SEQ ID NO: 192

SEQ ID NO: 1050 - protein, 34 aa, Mus musculus; identical to SEQ ID NO: 192

SEQ ID NO: 1051 - protein, 20 aa, Mus musculus
TFSECSYPETEEEAEALPGR

SEQ ID NO: 1052 - protein, 44 aa, Mus musculus
LSSDENSNPDLSGDENDDAVSIESGTNTERPDTPTNTPNAPGRK

SEQ ID NO: 1053 - protein, 44 aa, Mus musculus; identical to SEQ ID NO: 1052

SEQ ID NO: 1054 - protein, 36 aa, Mus musculus
RPPGDVLETFNFLENADDSDEEENDMIEGIPEGKDK

SEQ ID NO: 1055 - protein, 36 aa, Mus musculus; identical to SEQ ID NO: 1054

SEQ ID NO: 1056 - protein, 36 aa, Mus musculus
DGEGPDNLEPACPLSLPLQGNHTAADMYLSPLRSPK

SEQ ID NO: 1057 - protein, 36 aa, Mus musculus; identical to SEQ ID NO: 1056

SEQ ID NO: 1058 - protein, 36 aa, Mus musculus; identical to SEQ ID NO: 1056

SEQ ID NO: 1059 - protein, 14 aa, Mus musculus
GDTSETASATPAYR

SEQ ID NO: 1060 - protein, 44 aa, Mus musculus
TGVNENTVVSAGKDLSTSPKPSPIPSPVLGQKPNASQSLLAWCR

SEQ ID NO: 1061 - protein, 42 aa, Mus musculus
STSSVDSDILSSSHSSDTLCNADSAQIPLANGLDSHSITSSR

SEQ ID NO: 1062 - protein, 37 aa, Mus musculus; identical to SEQ ID NO: 137

SEQ ID NO: 1063 - protein, 37 aa, Mus musculus; identical to SEQ ID NO: 137

SEQ ID NO: 1064 - protein, 21 aa, Mus musculus
SDELLGDLTRTPPSSSAAFLK

SEQ ID NO: 1065 - protein, 21 aa, Mus musculus
SDELLGDLTRTPPSSSAAFLK

SEQ ID NO: 1066 - protein, 36 aa, Mus musculus
GTFSDQELDAQSLDDEDDSLQHAVHPALNRFSPSPR

SEQ ID NO: 1067 - protein, 12 aa, Mus musculus
SLPVSVPVWAFK

SEQ ID NO: 1068 - protein, 12 aa, Mus musculus
SLPVSVPVWAFK

SEQ ID NO: 1069 - protein, 12 aa, Mus musculus
SLPVSVPVWAFK

SEQ ID NO: 1070 - protein, 12 aa, Mus musculus
SLPVSVPVWAFK

SEQ ID NO: 1071 - protein, 25 aa, Mus musculus
SLMSSPEDLTKDFEELKAEEIDVAK

SEQ ID NO: 1072 - protein, 25 aa, Mus musculus
SLMSSPEDLTKDFEELKAEEIDVAK

SEQ ID NO: 1073 - protein, 43 aa, Mus musculus
GTLVHTTSDSDSEDGDQEAEEESSLDTQKPTTVVLCEPSQEPK

SEQ ID NO: 1074 - protein, 39 aa, Mus musculus; identical to SEQ ID NO: 707

SEQ ID NO: 1075 - protein, 26 aa, Mus musculus
CPSQSSSRPATGISQPPTTPTGQATR

SEQ ID NO: 1076 - protein, 28 aa, Mus musculus
RANTLSHFPVECPAPPEPAQSSPGVSQR

SEQ ID NO: 1077 - protein, 28 aa, Mus musculus
RANTLSHFPVECPAPPEPAQSSPGVSQR

SEQ ID NO: 1078 - protein, 39 aa, Mus musculus; identical to SEQ ID NO: 707

SEQ ID NO: 1079 - protein, 39 aa, Mus musculus; identical to SEQ ID NO: 707

SEQ ID NO: 1080 - protein, 16 aa, Mus musculus
MSCFSRPSMSPTPLDR

SEQ ID NO: 1081 - protein, 34 aa, Mus musculus
EVDPSTGELQSLQMPESEGPSSLDPSQEGPTGLK

SEQ ID NO: 1082 - protein, 34 aa, Mus musculus; identical to SEQ ID NO: 1081

SEQ ID NO: 1083 - protein, 34 aa, Mus musculus; identical to SEQ ID NO: 1081

SEQ ID NO: 1084 - protein, 34 aa, Mus musculus; identical to SEQ ID NO: 1081

SEQ ID NO: 1085 - protein, 12 aa, Mus musculus
LCSSSSSDTSPR

SEQ ID NO: 1086 - protein, 33 aa, Mus musculus
YEMACAIADAFNLPSSHLRPITDSPVIGAQRPK

SEQ ID NO: 1087 - protein, 21 aa, Mus musculus
LSTTPSPTNSLHEDGVDDFRR

SEQ ID NO: 1088 - protein, 21 aa, Mus musculus
LSTTPSPTNSLHEDGVDDFRR

SEQ ID NO: 1089 - protein, 21 aa, Mus musculus
LSTTPSPTNSLHEDGVDDFRR

SEQ ID NO: 1090 - protein, 16 aa, Mus musculus
RFSVQEQDWETTPPKK

SEQ ID NO: 1091 - protein, 16 aa, Mus musculus
RFSVQEQDWETTPPKK

SEQ ID NO: 1092 - protein, 37 aa, Mus musculus
GEGVSQVGPGTPPAPESPRKPISGVQGNDPGISLPQR

SEQ ID NO: 1093 - protein, 18 aa, Mus musculus
MELGTPLRHSGSTSPYPK

SEQ ID NO: 1094 - protein, 18 aa, Mus musculus
MELGTPLRHSGSTSPYPK

SEQ ID NO: 1095 - protein, 18 aa, Mus musculus
MELGTPLRHSGSTSPYPK

SEQ ID NO: 1096 - protein, 18 aa, Mus musculus
EISQSRNPSVSEHLPDEK

SEQ ID NO: 1097 - protein, 42 aa, Mus musculus; identical to SEQ ID NO: 140

SEQ ID NO: 1098 - protein, 37 aa, Mus musculus
SGFARPGDLEFEDFSQVINRVPSDSSLGTPDGRPELR

SEQ ID NO: 1099 - protein, 19 aa, Mus musculus
CGSPSDSSTSEMMEVAVNK

SEQ ID NO: 1100 - protein, 11 aa, Mus musculus
VGSLTPPSSPK

SEQ ID NO: 1101 - protein, 25 aa, Mus musculus
GPPDFSSDEEREPTPVLGSGASVGR

SEQ ID NO: 1102 - protein, 39 aa, Mus musculus; identical to SEQ ID NO: 707

SEQ ID NO: 1103 - protein, 39 aa, Mus musculus; identical to SEQ ID NO: 707

SEQ ID NO: 1104 - protein, 16 aa, Mus musculus
RFSVQEQDWETTPPKK

SEQ ID NO: 1105 - protein, 16 aa, Mus musculus
RFSVQEQDWETTPPKK

SEQ ID NO: 1106 - protein, 21 aa, Mus musculus
LSTTPSPTNSLHEDGVDDFRR

SEQ ID NO: 1107 - protein, 21 aa, Mus musculus
LSTTPSPTNSLHEDGVDDFRR

SEQ ID NO: 1108 - protein, 21 aa, Mus musculus
LSTTPSPTNSLHEDGVDDFRR

SEQ ID NO: 1109 - protein, 42 aa, Mus musculus; identical to SEQ ID NO: 140

SEQ ID NO: 1110 - protein, 42 aa, Mus musculus; identical to SEQ ID NO: 140

SEQ ID NO: 1111 - protein, 44 aa, Mus musculus
SSASGTHSESPEKLQCPVTEPGQGILENTGTEPGETSDKECNER

SEQ ID NO: 1112 - protein, 42 aa, Mus musculus; identical to SEQ ID NO: 140

SEQ ID NO: 1113 - protein, 18 aa, Mus musculus
EISQSRNPSVSEHLPDEK

SEQ ID NO: 1114 - protein, 27 aa, Mus musculus
SQSSEGVSSLSSSPSNSLETQSQSLSR

SEQ ID NO: 1115 - protein, 27 aa, Mus musculus
SQSSEGVSSLSSSPSNSLETQSQSLSR

SEQ ID NO: 1116 - protein, 17 aa, Mus musculus
SRSSSPDSKMELGTPLR

SEQ ID NO: 1117 - protein, 19 aa, Mus musculus
ASYSGTSPSHSFISGEPDR

SEQ ID NO: 1118 - protein, 18 aa, Mus musculus
WAAHGTSPEDFSLTLGAR

SEQ ID NO: 1119 - protein, 41 aa, Mus musculus
NGVSLFNSPKTEQPSPVVHSFPHPELPEAFVGTPISNTSQR

SEQ ID NO: 1120 - protein, 41 aa, Mus musculus; identical to SEQ ID NO: 1119

SEQ ID NO: 1121 - protein, 41 aa, Mus musculus; identical to SEQ ID NO: 1119

SEQ ID NO: 1122 - protein, 36 aa, Mus musculus; identical to SEQ ID NO: 1056

SEQ ID NO: 1123 - protein, 36 aa, Mus musculus; identical to SEQ ID NO: 1056

SEQ ID NO: 1124 - protein, 26 aa, Mus musculus
LGEQGPEPGPTPPQTPTPPSTPPLAK

SEQ ID NO: 1125 - protein, 43 aa, Mus musculus
NGSPVPVPDISQEPDGPALSGGEEDAEDGAEPLEVALEPAEPR

SEQ ID NO: 1126 - protein, 43 aa, Mus musculus; identical to SEQ ID NO: 1125

SEQ ID NO: 1127 - protein, 43 aa, Mus musculus; identical to SEQ ID NO: 1125

SEQ ID NO: 1128 - protein, 37 aa, Mus musculus
TAVTATNVSAHGSQANSPSTPNSAGGYPSPCYQPDRR

SEQ ID NO: 1129 - protein, 45 aa, Mus musculus
SSSHLDPAATPHSTLQGSSAGTPEHPSVIDPLMEQDEGPGTPPAK

SEQ ID NO: 1130 - protein, 21 aa, Mus musculus
LSTTPSPTNSLHEDGVDDFRR

SEQ ID NO: 1131 - protein, 21 aa, Mus musculus
LSTTPSPTNSLHEDGVDDFRR

SEQ ID NO: 1132 - protein, 16 aa, Mus musculus
SINYSELDQFPSELEK

SEQ ID NO: 1133 - protein, 16 aa, Mus musculus
SINYSELDQFPSELEK

SEQ ID NO: 1134 - protein, 16 aa, Mus musculus
SINYSELDQFPSELEK

SEQ ID NO: 1135 - protein, 13 aa, Mus musculus
VGSEHSLLDPPGK

SEQ ID NO: 1136 - protein, 36 aa, Mus musculus
TVAISDAAQLPQDYCTTPGGTLFSTTPGGTRIIYDR

SEQ ID NO: 1137 - protein, 36 aa, Mus musculus; identical to SEQ ID NO: 1136

SEQ ID NO: 1138 - protein, 45 aa, Mus musculus
ANNAGASIYPTGPADPCPPASESSPEQWQSPEDKPQDIHSQGEAR

SEQ ID NO: 1139 - protein, 18 aa, Mus musculus
AESPETSAVESTQSTPQK

SEQ ID NO: 1140 - protein, 18 aa, Mus musculus
AESPETSAVESTQSTPQK

SEQ ID NO: 1141 - protein, 18 aa, Mus musculus
AESPETSAVESTQSTPQK

SEQ ID NO: 1142 - protein, 22 aa, Mus musculus
HNLFEDNMALPSESVSSLTDLK

SEQ ID NO: 1143 - protein, 42 aa, Mus musculus; identical to SEQ ID NO: 140

SEQ ID NO: 1144 - protein, 20 aa, Mus musculus
SRSSPSTDHYSQEVPVEPNR

SEQ ID NO: 1145 - protein, 20 aa, Mus musculus
SRSSPSTDHYSQEVPVEPNR

SEQ ID NO: 1146 - protein, 20 aa, Mus musculus
SRSSPSTDHYSQEVPVEPNR

SEQ ID NO: 1147 - protein, 28 aa, Mus musculus
SNSFSDEREFSAPSTPTGTLEFAGGDAK

SEQ ID NO: 1148 - protein, 28 aa, Mus musculus
SNSFSDEREFSAPSTPTGTLEFAGGDAK

SEQ ID NO: 1149 - protein, 28 aa, Mus musculus
SNSFSDEREFSAPSTPTGTLEFAGGDAK

SEQ ID NO: 1150 - protein, 42 aa, Mus musculus; identical to SEQ ID NO: 140

SEQ ID NO: 1151 - protein, 17 aa, Mus musculus
GPSPSPVGSPASVAQSR

SEQ ID NO: 1152 - protein, 35 aa, Mus musculus
HNLFEDNMALPSESVSSLTDLKTAMGSNQASPARR

SEQ ID NO: 1153 - protein, 35 aa, Mus musculus; identical to SEQ ID NO: 1152

SEQ ID NO: 1154 - protein, 36 aa, Mus musculus
FPPSTPSEVLSPTEDPRSPPACSSSSSSLFSAVVAR

SEQ ID NO: 1155 - protein, 30 aa, Mus musculus
CDGSPRTPPSTPPATANLSADDDFQNTDLR

SEQ ID NO: 1156 - protein, 17 aa, Mus musculus
TSPAGGTWSSVVSGVPR

SEQ ID NO: 1157 - protein, 17 aa, Mus musculus
TSPAGGTWSSVVSGVPR

SEQ ID NO: 1158 - protein, 14 aa, Mus musculus
SQDSYPGSPSLSPR

SEQ ID NO: 1159 - protein, 14 aa, Mus musculus
SQDSYPGSPSLSPR

SEQ ID NO: 1160 - protein, 14 aa, Mus musculus
SQDSYPGSPSLSPR

SEQ ID NO: 1161 - protein, 14 aa, Mus musculus
SQDSYPGSPSLSPR

SEQ ID NO: 1162 - protein, 14 aa, Mus musculus
SQDSYPGSPSLSPR

SEQ ID NO: 1163 - protein, 21 aa, Mus musculus
LSTTPSPTNSLHEDGVDDFRR

SEQ ID NO: 1164 - protein, 21 aa, Mus musculus
LSTTPSPTNSLHEDGVDDFRR

SEQ ID NO: 1165 - protein, 20 aa, Mus musculus
DQEEELDEQAGSIQMLEQLK

SEQ ID NO: 1166 - protein, 31 aa, Mus musculus; identical to SEQ ID NO: 153

SEQ ID NO: 1167 - protein, 31 aa, Mus musculus; identical to SEQ ID NO: 153

SEQ ID NO: 1168 - protein, 26 aa, Mus musculus
TAPPVLPTGYDSEEEEESRPMSYDEK

SEQ ID NO: 1169 - protein, 16 aa, Mus musculus
ENPPSPPTSPAAPQPR

SEQ ID NO: 1170 - protein, 14 aa, Mus musculus
DSVDLQSLMTEMNR

SEQ ID NO: 1171 - protein, 25 aa, Mus musculus
LSPFFTLDLSPTDDKSSKPSSFTEK

SEQ ID NO: 1172 - protein, 13 aa, Mus musculus
SLPTTVPESPNYR

SEQ ID NO: 1173 - protein, 31 aa, Mus musculus
VAPSMSSLNSLASSCFDLTDVSLNTEAGDSR

SEQ ID NO: 1174 - protein, 13 aa, Mus musculus
SLPTTVPESPNYR

SEQ ID NO: 1175 - protein, 14 aa, Mus musculus
IFTEANLVSVGSKK

SEQ ID NO: 1176 - protein, 42 aa, Mus musculus; identical to SEQ ID NO: 140

SEQ ID NO: 1177 - protein, 28 aa, Mus musculus
TLEVVSPSQSVTGSAGHTPYYQSPTDEK

SEQ ID NO: 1178 - protein, 31 aa, Mus musculus; identical to SEQ ID NO: 153

SEQ ID NO: 1179 - protein, 12 aa, Mus musculus
VVKEDGVMSPEK

SEQ ID NO: 1180 - protein, 29 aa, Mus musculus
DLKPETDYVVNVYSVVEDEYSEPLKGTEK

SEQ ID NO: 1181 - protein, 37 aa, Mus musculus
QAVYYLTLQATDGGNQSTTTALEITLLDINDNPPVVR

SEQ ID NO: 1182 - protein, 8 aa, Mus musculus
LNTSDFQK

SEQ ID NO: 1183 - protein, 7 aa, Mus musculus
LPDLRSR

SEQ ID NO: 1184 - protein, 20 aa, Mus musculus
TPGPPSSQGSPVDTQPAAQK

SEQ ID NO: 1185 - protein, 42 aa, Mus musculus; identical to SEQ ID NO: 140

SEQ ID NO: 1186 - protein, 21 aa, Mus musculus
TPGVPKQKPCSPLSEPDAFLK

SEQ ID NO: 1187 - protein, 34 aa, Mus musculus; identical to SEQ ID NO: 1081

SEQ ID NO: 1188 - protein, 34 aa, Mus musculus; identical to SEQ ID NO: 1081

SEQ ID NO: 1189 - protein, 8 aa, Mus musculus
LNTSDFQK

SEQ ID NO: 1190 - protein, 13 aa, Mus musculus
DMPAAGSLGSSSR

SEQ ID NO: 1191 - protein, 31 aa, Mus musculus; identical to SEQ ID NO: 153

SEQ ID NO: 1192 - protein, 22 aa, Mus musculus
VPMVSSQPTSSMVPPPIKPLNR

SEQ ID NO: 1193 - protein, 10 aa, Mus musculus
KLPVVSSVVK

SEQ ID NO: 1194 - protein, 33 aa, Mus musculus
QADVADQQTTELPAENGETENQSPASEEEKEAK

SEQ ID NO: 1195 - protein, 33 aa, Mus musculus; identical to SEQ ID NO: 1194

SEQ ID NO: 1196 - protein, 12 aa, Mus musculus
GPNSPPPGMPLR

SEQ ID NO: 1197 - protein, 8 aa, Mus musculus
FTISAISK

SEQ ID NO: 1198 - protein, 32 aa, Mus musculus
IVHFSVNACLTPICSLHHVAVTTVEGIGNTKK

SEQ ID NO: 1199 - protein, 31 aa, Mus musculus; identical to SEQ ID NO: 153

SEQ ID NO: 1200 - protein, 23 aa, Mus musculus
KGSFSGRLSPAYSLGSLTGASPR

SEQ ID NO: 1201 - protein, 28 aa, Mus musculus
TRSPDVISSASTALSQDIPEIASEALSR

SEQ ID NO: 1202 - protein, 8 aa, Mus musculus
RKETPSPR

SEQ ID NO: 1203 - protein, 10 aa, Mus musculus
KIIETMSSPK

SEQ ID NO: 1204 - protein, 43 aa, Mus musculus
SAASGSSGESMDSVSVSSCESNHSEAEEGPVTPMDTPDEPQKK

SEQ ID NO: 1205 - protein, 11 aa, Mus musculus
VHSPPASLVPR

SEQ ID NO: 1206 - protein, 19 aa, Mus musculus
VAAAAGSGPSPPCSPGHDR

SEQ ID NO: 1207 - protein, 38 aa, Mus musculus
MQVDQEEPHTEEQQQQPQTPAENKAESEEMETSQAGSK

SEQ ID NO: 1208 - protein, 26 aa, Mus musculus
KTSFDQDSDVDIFPSDFTSEPPALPR

SEQ ID NO: 1209 - protein, 25 aa, Mus musculus
VGSGAEPGEGSPGSRPGPIQADSPK

SEQ ID NO: 1210 - protein, 18 aa, Mus musculus
SPTKAEPATPAEAAQSDR

SEQ ID NO: 1211 - protein, 20 aa, Mus musculus
RQSSESDIESVMYTIEAVAK

SEQ ID NO: 1212 - protein, 11 aa, Mus musculus
SLGEIAALTSK

SEQ ID NO: 1213 - protein, 30 aa, Mus musculus; identical to SEQ ID NO: 136

SEQ ID NO: 1214 - protein, 31 aa, Mus musculus; identical to SEQ ID NO: 153

SEQ ID NO: 1215 - protein, 32 aa, Mus musculus; identical to SEQ ID NO: 163

SEQ ID NO: 1216 - protein, 32 aa, Mus musculus; identical to SEQ ID NO: 163

SEQ ID NO: 1217 - protein, 31 aa, Mus musculus; identical to SEQ ID NO: 153

SEQ ID NO: 1218 - protein, 20 aa, Mus musculus
KEANEVLSDSAGEDHPAELR

SEQ ID NO: 1219 - protein, 20 aa, Mus musculus
SNDDLLAGMAGGVNVTNGIK

SEQ ID NO: 1220 - protein, 18 aa, Mus musculus
AGAISASGPELEGAGHSK

SEQ ID NO: 1221 - protein, 21 aa, Mus musculus
TARPNSEAPLSGSEDADDSNK

SEQ ID NO: 1222 - protein, 18 aa, Mus musculus
LKTEEGEIVYSAEESENR

SEQ ID NO: 1223 - protein, 15 aa, Mus musculus
DWDKESEGEEPAGGR

SEQ ID NO: 1224 - protein, 15 aa, Mus musculus
DWDKESEGEEPAGGR

SEQ ID NO: 1225 - protein, 32 aa, Mus musculus; identical to SEQ ID NO: 163

SEQ ID NO: 1226 - protein, 32 aa, Mus musculus; identical to SEQ ID NO: 163

SEQ ID NO: 1227 - protein, 32 aa, Mus musculus; identical to SEQ ID NO: 163

SEQ ID NO: 1228 - protein, 10 aa, Mus musculus
IEILDSPASK

SEQ ID NO: 1229 - protein, 19 aa, Mus musculus
RDSSDDWEIPDGQITVGQR

SEQ ID NO: 1230 - protein, 15 aa, Mus musculus
SSPVCSTAPVETEPK

SEQ ID NO: 1231 - protein, 9 aa, Mus musculus
MGQEFVESK

SEQ ID NO: 1232 - protein, 27 aa, Mus musculus
LWTHTSDQQVSAISNPSPCASVTAEGK

SEQ ID NO: 1233 - protein, 21 aa, Mus musculus
DDSTCLGGILPAGLEPGSSTR

SEQ ID NO: 1234 - protein, 31 aa, Mus musculus; identical to SEQ ID NO: 153

SEQ ID NO: 1235 - protein, 31 aa, Mus musculus
CGSGPVHISGQHLVAVEEDAESEDEDEEDVK

SEQ ID NO: 1236 - protein, 31 aa, Mus musculus; identical to SEQ ID NO: 153

SEQ ID NO: 1237 - protein, 31 aa, Mus musculus; identical to SEQ ID NO: 153

SEQ ID NO: 1238 - protein, 31 aa, Mus musculus; identical to SEQ ID NO: 153

SEQ ID NO: 1239 - protein, 31 aa, Mus musculus; identical to SEQ ID NO: 153

SEQ ID NO: 1240 - protein, 26 aa, Mus musculus
EDGDILASSFSVDTQVAYILSLGVVK

SEQ ID NO: 1241 - protein, 25 aa, Mus musculus
SNSAPLIHGLSDSSPVFQAEAPSAR

SEQ ID NO: 1242 - protein, 11 aa, Mus musculus
DGYYGESTSGR

SEQ ID NO: 1243 - protein, 32 aa, Mus musculus; identical to SEQ ID NO: 163

SEQ ID NO: 1244 - protein, 42 aa, Mus musculus
TELSPSFINPNPLEWFAGEEPTEESEKPLTQSGGAPPPSGGK

SEQ ID NO: 1245 - protein, 33 aa, Mus musculus
HQIVCINNDLSEEESDDESEEDEIKLCGILPAK

SEQ ID NO: 1246 - protein, 28 aa, Mus musculus
TRSPDVISSASTALSQDIPEIASEALSR

SEQ ID NO: 1247 - protein, 20 aa, Mus musculus
ALVIQESESPPSPPPSPDRR

SEQ ID NO: 1248 - protein, 15 aa, Mus musculus
ILSDDEDEDEEDAFK

SEQ ID NO: 1249 - protein, 42 aa, Mus musculus; identical to SEQ ID NO: 1244

SEQ ID NO: 1250 - protein, 31 aa, Mus musculus; identical to SEQ ID NO: 153

SEQ ID NO: 1251 - protein, 32 aa, Mus musculus; identical to SEQ ID NO: 163

SEQ ID NO: 1252 - protein, 32 aa, Mus musculus; identical to SEQ ID NO: 163

SEQ ID NO: 1253 - protein, 32 aa, Mus musculus; identical to SEQ ID NO: 163

SEQ ID NO: 1254 - protein, 13 aa, Mus musculus
SDGSLDDGDGIHR

SEQ ID NO: 1255 - protein, 22 aa, Mus musculus
QGFPDRESPVSDLTSTGLYQDK

SEQ ID NO: 1256 - protein, 31 aa, Mus musculus; identical to SEQ ID NO: 153

SEQ ID NO: 1257 - protein, 30 aa, Mus musculus; identical to SEQ ID NO: 136

SEQ ID NO: 1258 - protein, 36 aa, Mus musculus
TDYYPEEMSPPLMNPVSPPQALLQENHPSVIVQPGK

SEQ ID NO: 1259 - protein, 31 aa, Mus musculus; identical to SEQ ID NO: 153

SEQ ID NO: 1260 - protein, 15 aa, Mus musculus
TQTPPLGQTPQLGLK

SEQ ID NO: 1261 - protein, 31 aa, Mus musculus
KAENAEGQTPAIGPDGEPLDETSQMSDLPVK

SEQ ID NO: 1262 - protein, 42 aa, Mus musculus; identical to SEQ ID NO: 140

SEQ ID NO: 1263 - protein, 36 aa, Mus musculus
EGENVKPVNSGTWVASNSELTPSESLVTTDDETFEK

SEQ ID NO: 1264 - protein, 17 aa, Mus musculus
ASDDLGEPDVFATAPFR

SEQ ID NO: 1265 - protein, 42 aa, Mus musculus; identical to SEQ ID NO: 140

SEQ ID NO: 1266 - protein, 31 aa, Mus musculus; identical to SEQ ID NO: 153

SEQ ID NO: 1267 - protein, 26 aa, Mus musculus
RAAAASAAEAGIATPGTEDSDDALLK

SEQ ID NO: 1268 - protein, 31 aa, Mus musculus; identical to SEQ ID NO: 153

SEQ ID NO: 1269 - protein, 31 aa, Mus musculus; identical to SEQ ID NO: 153

SEQ ID NO: 1270 - protein, 25 aa, Mus musculus
AAVGVTGNDITTPPNKEPPPSPEKK

SEQ ID NO: 1271 - protein, 31 aa, Mus musculus; identical to SEQ ID NO: 153

SEQ ID NO: 1272 - protein, 31 aa, Mus musculus; identical to SEQ ID NO: 153

SEQ ID NO: 1273 - protein, 31 aa, Mus musculus; identical to SEQ ID NO: 153

SEQ ID NO: 1274 - protein, 31 aa, Mus musculus; identical to SEQ ID NO: 153

SEQ ID NO: 1275 - protein, 29 aa, Mus musculus
NSPMAQTPPCHLPNIPGVTSPGALIEDSK

SEQ ID NO: 1276 - protein, 31 aa, Mus musculus; identical to SEQ ID NO: 153

SEQ ID NO: 1277 - protein, 31 aa, Mus musculus; identical to SEQ ID NO: 153

SEQ ID NO: 1278 - protein, 11 aa, Mus musculus
VSSTPETPLTK

SEQ ID NO: 1279 - protein, 29 aa, Mus musculus
NSPMAQTPPCHLPNIPGVTSPGALIEDSK

SEQ ID NO: 1280 - protein, 31 aa, Mus musculus; identical to SEQ ID NO: 153

SEQ ID NO: 1281 - protein, 31 aa, Mus musculus; identical to SEQ ID NO: 153

SEQ ID NO: 1282 - protein, 31 aa, Mus musculus; identical to SEQ ID NO: 153

SEQ ID NO: 1283 - protein, 27 aa, Mus musculus
IKPVTENLVLPSHTGFCQSSGDEALSK

SEQ ID NO: 1284 - protein, 27 aa, Mus musculus
IKPVTENLVLPSHTGFCQSSGDEALSK

SEQ ID NO: 1285 - protein, 30 aa, Mus musculus
IGFPETAEEELEEIASENSDSIYSSTPEVK

SEQ ID NO: 1286 - protein, 31 aa, Mus musculus; identical to SEQ ID NO: 153

SEQ ID NO: 1287 - protein, 14 aa, Mus musculus
TASGSSVTSLEGTR

SEQ ID NO: 1288 - protein, 14 aa, Mus musculus
TASGSSVTSLEGTR

SEQ ID NO: 1289 - protein, 14 aa, Mus musculus
TASGSSVTSLEGTR

SEQ ID NO: 1290 - protein, 16 aa, Mus musculus
SMDVDLNQAHMEDTPK

SEQ ID NO: 1291 - protein, 35 aa, Mus musculus
SQLVHGCSQDSDELNPGGLGSAGGVGSPEPPTSPR

SEQ ID NO: 1292 - protein, 35 aa, Mus musculus; identical to SEQ ID NO: 1291

SEQ ID NO: 1293 - protein, 25 aa, Mus musculus
LSPFFTLDLSPTDDKSSKPSSFTEK

SEQ ID NO: 1294 - protein, 32 aa, Mus musculus; identical to SEQ ID NO: 163

SEQ ID NO: 1295 - protein, 16 aa, Mus musculus
KQPPVSPGTALVGSQK

SEQ ID NO: 1296 - protein, 31 aa, Mus musculus; identical to SEQ ID NO: 153

SEQ ID NO: 1297 - protein, 16 aa, Mus musculus
VSPMLPSSSLESPKDK

SEQ ID NO: 1298 - protein, 28 aa, Mus musculus
SQSGSPAAPVEQVVIHTDTSGDPTLPQR

SEQ ID NO: 1299 - protein, 16 aa, Mus musculus
RILSDDEDEDEEDAFK

SEQ ID NO: 1300 - protein, 32 aa, Mus musculus; identical to SEQ ID NO: 163

SEQ ID NO: 1301 - protein, 32 aa, Mus musculus; identical to SEQ ID NO: 163

SEQ ID NO: 1302 - protein, 23 aa, Mus musculus
KQQHVISTEEGDMMETNSTDDEK

SEQ ID NO: 1303 - protein, 23 aa, Mus musculus
KQQHVISTEEGDMMETNSTDDEK

SEQ ID NO: 1304 - protein, 28 aa, Mus musculus
SQSGSPAAPVEQVVIHTDTSGDPTLPQR

SEQ ID NO: 1305 - protein, 21 aa, Mus musculus
AENQRPAEDSALSPGPLAGAK

SEQ ID NO: 1306 - protein, 21 aa, Mus musculus
AENQRPAEDSALSPGPLAGAK

SEQ ID NO: 1307 - protein, 29 aa, Mus musculus
GLPYADHNYGAPPPPTPPASPPVQTIIPR

SEQ ID NO: 1308 - protein, 17 aa, Mus musculus
HGSSSYPPVIYSPLMPK

SEQ ID NO: 1309 - protein, 17 aa, Mus musculus
HGSSSYPPVIYSPLMPK

SEQ ID NO: 1310 - protein, 17 aa, Mus musculus
HGSSSYPPVIYSPLMPK

SEQ ID NO: 1311 - protein, 33 aa, Mus musculus
AGADIHAENEEPLCPLPSPSTSGSDSDSEGPER

SEQ ID NO: 1312 - protein, 36 aa, Mus musculus
EGDELGEGERPEDDTAAIELSSDEAVEVEEVIEESR

SEQ ID NO: 1313 - protein, 36 aa, Mus musculus; identical to SEQ ID NO: 1312

SEQ ID NO: 1314 - protein, 17 aa, Mus musculus
RSSLVDEAPEDEEFEQK

SEQ ID NO: 1315 - protein, 29 aa, Mus musculus
GLPYADHNYGAPPPPTPPASPPVQTIIPR

SEQ ID NO: 1316 - protein, 19 aa, Mus musculus
VAAAAGSGPSPPCSPGHDR

SEQ ID NO: 1317 - protein, 18 aa, Mus musculus
SPTKAEPATPAEAAQSDR

SEQ ID NO: 1318 - protein, 32 aa, Mus musculus; identical to SEQ ID NO: 163

SEQ ID NO: 1319 - protein, 29 aa, Mus musculus
GLPYADHNYGAPPPPTPPASPPVQTIIPR

SEQ ID NO: 1320 - protein, 37 aa, Mus musculus
IWDPTPSHTPAGAATPGRGDTPGHATPGHGGATSSAR

SEQ ID NO: 1321 - protein, 19 aa, Mus musculus
TEDEEFLIQHLLQAPSPPR

SEQ ID NO: 1322 - protein, 33 aa, Mus musculus
SGSCSSPQPKPNYPPLSPPLPLPQLLPSVTEAR

SEQ ID NO: 1323 - protein, 21 aa, Mus musculus
AKQPVIGDQNSDSDEMLAVLK

SEQ ID NO: 1324 - protein, 21 aa, Mus musculus
AKQPVIGDQNSDSDEMLAVLK

SEQ ID NO: 1325 - protein, 22 aa, Mus musculus
DTTSFEDISPQGISDDSSTGSR

SEQ ID NO: 1326 - protein, 34 aa, Mus musculus; identical to SEQ ID NO: 174

SEQ ID NO: 1327 - protein, 34 aa, Mus musculus; identical to SEQ ID NO: 174

SEQ ID NO: 1328 - protein, 21 aa, Mus musculus
AHSLLFENSDSFSEDTGTLGR

SEQ ID NO: 1329 - protein, 38 aa, Mus musculus; identical to SEQ ID NO: 272

SEQ ID NO: 1330 - protein, 13 aa, Mus musculus
RDSSSLSSPLNPK

SEQ ID NO: 1331 - protein, 31 aa, Mus musculus; identical to SEQ ID NO: 153

SEQ ID NO: 1332 - protein, 22 aa, Mus musculus
ETVVSGPLGVEDISPSMSPDDK

SEQ ID NO: 1333 - protein, 18 aa, Mus musculus
AASPAKPSSLDLVPNLPR

SEQ ID NO: 1334 - protein, 35 aa, Mus musculus
SCSVTDTVAEQAHLPPPSVAYVHTTPGLPSGWEER

SEQ ID NO: 1335 - protein, 20 aa, Mus musculus
AVPFVPMSYQLSQSYYSLGK

SEQ ID NO: 1336 - protein, 11 aa, Mus musculus
IPMPPSSPQPR

SEQ ID NO: 1337 - protein, 39 aa, Mus musculus; identical to SEQ ID NO: 543

SEQ ID NO: 1338 - protein, 28 aa, Mus musculus
LMKPPSPEHQSPDTQQEGGEEEEAMVAR

SEQ ID NO: 1339 - protein, 14 aa, Mus musculus
TASGSSVTSLEGTR

SEQ ID NO: 1340 - protein, 14 aa, Mus musculus
TASGSSVTSLEGTR

SEQ ID NO: 1341 - protein, 14 aa, Mus musculus
TASGSSVTSLEGTR

SEQ ID NO: 1342 - protein, 29 aa, Mus musculus
GLPYADHNYGAPPPPTPPASPPVQTIIPR

SEQ ID NO: 1343 - protein, 32 aa, Mus musculus; identical to SEQ ID NO: 163

SEQ ID NO: 1344 - protein, 27 aa, Mus musculus
ILGDHLLLDPAHELPPYTPPPMLSPVR

SEQ ID NO: 1345 - protein, 26 aa, Mus musculus
SCSMELHGEGNQEPGSPAVFAHPLER

SEQ ID NO: 1346 - protein, 32 aa, Mus musculus; identical to SEQ ID NO: 163

SEQ ID NO: 1347 - protein, 34 aa, Mus musculus; identical to SEQ ID NO: 174

SEQ ID NO: 1348 - protein, 9 aa, Mus musculus
KPEFSPTLK

SEQ ID NO: 1349 - protein, 31 aa, Mus musculus
SETPPVPPPPPYLANYPGFPENGTPGPPISR

SEQ ID NO: 1350 - protein, 28 aa, Mus musculus
SNSFSDEREFSAPSTPTGTLEFAGGDAK

SEQ ID NO: 1351 - protein, 25 aa, Mus musculus
LVSPETEASEESLQFSLEKPTTAER

SEQ ID NO: 1352 - protein, 12 aa, Mus musculus
LTTTGQVTSPVK

SEQ ID NO: 1353 - protein, 25 aa, Mus musculus
AAVGVTGNDITTPPNKEPPPSPEKK

SEQ ID NO: 1354 - protein, 26 aa, Mus musculus
HLLTDLPLPPELPGGDPSPPDSPEPK

SEQ ID NO: 1355 - protein, 26 aa, Mus musculus
HLLTDLPLPPELPGGDPSPPDSPEPK

SEQ ID NO: 1356 - protein, 27 aa, Mus musculus
SLHKPMYFFLINLSALDILFTTTTVPK

SEQ ID NO: 1357 - protein, 37 aa, Mus musculus
VETPDVNLDQEEEIQMETDEGQGGVNGHADSPAPVNR

SEQ ID NO: 1358 - protein, 37 aa, Mus musculus; identical to SEQ ID NO: 1357

SEQ ID NO: 1359 - protein, 37 aa, Mus musculus; identical to SEQ ID NO: 623

SEQ ID NO: 1360 - protein, 16 aa, Mus musculus
ISSKSPGHMVILNQTK

SEQ ID NO: 1361 - protein, 28 aa, Mus musculus
SLLLADSNGYTNLPDVVQPSHSPTENSK

SEQ ID NO: 1362 - protein, 9 aa, Mus musculus
LSVVGPPNR

SEQ ID NO: 1363 - protein, 44 aa, Mus musculus
VVVADDDSEAPERPVNGAHPALQADDDSLLDQDLPLTNSQLSLK

SEQ ID NO: 1364 - protein, 44 aa, Mus musculus; identical to SEQ ID NO: 1363

SEQ ID NO: 1365 - protein, 18 aa, Mus musculus
DLSPGAPPAVAAAAPEER

SEQ ID NO: 1366 - protein, 32 aa, Mus musculus
EMPGSNIESSPEVEERPAVLSALDQSQSQPSK

SEQ ID NO: 1367 - protein, 44 aa, Mus musculus; identical to SEQ ID NO: 1363

SEQ ID NO: 1368 - protein, 44 aa, Mus musculus; identical to SEQ ID NO: 1363

SEQ ID NO: 1369 - protein, 30 aa, Mus musculus
EKPPFLPEEPSSSSEEDDPIPDELLCLICK

SEQ ID NO: 1370 - protein, 32 aa, Mus musculus; identical to SEQ ID NO: 163

SEQ ID NO: 1371 - protein, 32 aa, Mus musculus; identical to SEQ ID NO: 163

SEQ ID NO: 1372 - protein, 38 aa, Mus musculus
FQHPNTDMLQEKPSSPSPMPSSTPSPSLNLGSTEEAIR

SEQ ID NO: 1373 - protein, 33 aa, Mus musculus; identical to SEQ ID NO: 1245

SEQ ID NO: 1374 - protein, 39 aa, Mus musculus; identical to SEQ ID NO: 543

SEQ ID NO: 1375 - protein, 26 aa, Mus musculus
HLLTDLPLPPELPGGDPSPPDSPEPK

SEQ ID NO: 1376 - protein, 23 aa, Mus musculus
TCDSPQNPVDFISGPVPDSPFPR

SEQ ID NO: 1377 - protein, 31 aa, Mus musculus; identical to SEQ ID NO: 1235

SEQ ID NO: 1378 - protein, 17 aa, Mus musculus
ASCEENLPVFIASELAK

SEQ ID NO: 1379 - protein, 21 aa, Mus musculus
SSPKEEVASEPEEAASPTTPK

SEQ ID NO: 1380 - protein, 23 aa, Mus musculus
QVDTEEAGMVTAATASNVKASPK

SEQ ID NO: 1381 - protein, 34 aa, Mus musculus; identical to SEQ ID NO: 174

SEQ ID NO: 1382 - protein, 10 aa, Mus musculus
HAELSGSPLK

SEQ ID NO: 1383 - protein, 32 aa, Mus musculus
RGSPGGVEMNVELPQQEGDDDDDEDEEAAAGR

SEQ ID NO: 1384 - protein, 21 aa, Mus musculus
KPSVPDTASPADDSFVDPGER

SEQ ID NO: 1385 - protein, 36 aa, Mus musculus
MDTGEVSDIGSQGAPIVLSDSEEEEMIILEPEKNPK

SEQ ID NO: 1386 - protein, 21 aa, Mus musculus
AENQRPAEDSALSPGPLAGAK

SEQ ID NO: 1387 - protein, 25 aa, Mus musculus
DKDDQEWESTSPPKPTVFISGVIAR

SEQ ID NO: 1388 - protein, 30 aa, Mus musculus; identical to SEQ ID NO: 809

SEQ ID NO: 1389 - protein, 17 aa, Mus musculus
LDGELAITKPNVSSPSK

SEQ ID NO: 1390 - protein, 28 aa, Mus musculus
ALAEEDSEDELPSDVDFNDPYFAEEVKK

SEQ ID NO: 1391 - protein, 23 aa, Mus musculus
SISGTSTSEKPNSMDTANTSPFK

SEQ ID NO: 1392 - protein, 16 aa, Mus musculus
ETPPTPTSSPAEFSPK

SEQ ID NO: 1393 - protein, 22 aa, Mus musculus
IRPPPELETSLTERPSSPSLLR

SEQ ID NO: 1394 - protein, 33 aa, Mus musculus
LKCGSGPVHISGQHLVAVEEDAESEDEDEEDVK

SEQ ID NO: 1395 - protein, 16 aa, Mus musculus
TPVSPVKFSPGDFWGR

SEQ ID NO: 1396 - protein, 40 aa, Mus musculus
LSSSDSIGPDVTDILSDIAEEASKLPSTSDDCPPIGTPVR

SEQ ID NO: 1397 - protein, 27 aa, Mus musculus
ANTLSHFPVECPAPPEPAQSSPGVSQR

SEQ ID NO: 1398 - protein, 27 aa, Mus musculus
ANTLSHFPVECPAPPEPAQSSPGVSQR

SEQ ID NO: 1399 - protein, 31 aa, Mus musculus; identical to SEQ ID NO: 153

SEQ ID NO: 1400 - protein, 18 aa, Mus musculus
LLKPGEEPSEYTDEEDTK

SEQ ID NO: 1401 - protein, 17 aa, Mus musculus
NSGPVSEVNTGFSPEVK

SEQ ID NO: 1402 - protein, 28 aa, Mus musculus
RLSENNCSLDDWEIGAGHLSSSAFNSEK

SEQ ID NO: 1403 - protein, 28 aa, Mus musculus
RLSENNCSLDDWEIGAGHLSSSAFNSEK

SEQ ID NO: 1404 - protein, 17 aa, Mus musculus
LDGELAITKPNVSSPSK

SEQ ID NO: 1405 - protein, 23 aa, Mus musculus
VEEQVEDSDDEEDDDSHDDEEER

SEQ ID NO: 1406 - protein, 23 aa, Mus musculus
VEEQVEDSDDEEDDDSHDDEEER

SEQ ID NO: 1407 - protein, 42 aa, Mus musculus; identical to SEQ ID NO: 140

SEQ ID NO: 1408 - protein, 33 aa, Mus musculus; identical to SEQ ID NO: 1394

SEQ ID NO: 1409 - protein, 33 aa, Mus musculus
KLPPPPPQAPPEEENESEPEEPSGVEGAAFQSR

SEQ ID NO: 1410 - protein, 28 aa, Mus musculus
DGTAPPPQSPSSPGSGQDEDWSDEESPR

SEQ ID NO: 1411 - protein, 16 aa, Mus musculus
SPQVPAAQQMLNFPEK

SEQ ID NO: 1412 - protein, 28 aa, Mus musculus
SLTMVEDNEDDDEDGEELLHHHRVSGSR

SEQ ID NO: 1413 - protein, 24 aa, Mus musculus
LDRASPDLWPEQLPGVAEFAASFK

SEQ ID NO: 1414 - protein, 47 aa, Mus musculus
LPPPFPGMDPESEGAAGASEPEAGDSDTEGEDIFTGAAAATKPQSPK

SEQ ID NO: 1415 - protein, 31 aa, Mus musculus
GEATDLLRGSSPDVHTLLEITEESDAVLVDK

SEQ ID NO: 1416 - protein, 31 aa, Mus musculus; identical to SEQ ID NO: 1415

SEQ ID NO: 1417 - protein, 29 aa, Mus musculus
KPEPEAGQAEPLSPRPPPCPTLSVTVEPK

SEQ ID NO: 1418 - protein, 29 aa, Mus musculus
KPEPEAGQAEPLSPRPPPCPTLSVTVEPK

SEQ ID NO: 1419 - protein, 38 aa, Mus musculus
IEEPVSMEMDNHLSDKDESCYDNAEAAFSDDEEDLNSK

SEQ ID NO: 1420 - protein, 16 aa, Mus musculus
ISSKSPGHMVILNQTK

SEQ ID NO: 1421 - protein, 30 aa, Mus musculus; identical to SEQ ID NO: 1369

SEQ ID NO: 1422 - protein, 33 aa, Mus musculus
KGELMENDQDAMEYSSEEEEVDLQTALTGYQTK

SEQ ID NO: 1423 - protein, 32 aa, Mus musculus
VGESSEDVALEEETIYENEGFRPYTEDTLSAR

SEQ ID NO: 1424 - protein, 32 aa, Mus musculus; identical to SEQ ID NO: 1423

SEQ ID NO: 1425 - protein, 9 aa, Mus musculus
LGSFGSITR

SEQ ID NO: 1426 - protein, 29 aa, Mus musculus
STEESLSEDAFTESELSPIREELLSSEPR

SEQ ID NO: 1427 - protein, 29 aa, Mus musculus
STEESLSEDAFTESELSPIREELLSSEPR

SEQ ID NO: 1428 - protein, 9 aa, Mus musculus
LGSFGSITR

SEQ ID NO: 1429 - protein, 19 aa, Mus musculus
ASLSPMDEPVPDSESPVEK

SEQ ID NO: 1430 - protein, 48 aa, Mus musculus
NSNSYGIPEPAHAYAQPQTTTPLPTVASTPGAAINPLPSTQNGPVFAK

SEQ ID NO: 1431 - protein, 23 aa, Mus musculus
VSSAPIPCPSPSPAPSAVPSPPK

SEQ ID NO: 1432 - protein, 8 aa, Mus musculus
NSSFVLPK

SEQ ID NO: 1433 - protein, 27 aa, Mus musculus
GHTQTWPDTSSPEVMQTQVESPLLQSK

SEQ ID NO: 1434 - protein, 9 aa, Mus musculus
LGSFGSITR

SEQ ID NO: 1435 - protein, 9 aa, Mus musculus
LGSFGSITR

SEQ ID NO: 1436 - protein, 9 aa, Mus musculus
LGSFGSITR

SEQ ID NO: 1437 - protein, 9 aa, Mus musculus
LGSFGSITR

SEQ ID NO: 1438 - protein, 15 aa, Mus musculus
TQTPPLGQTPQLGLK

SEQ ID NO: 1439 - protein, 17 aa, Mus musculus
ATWGDGGDNSPSNVVSK

SEQ ID NO: 1440 - protein, 9 aa, Mus musculus
LGSFGSITR

SEQ ID NO: 1441 - protein, 18 aa, Mus musculus
EDGIDAVEVAADRPGSPR

SEQ ID NO: 1442 - protein, 27 aa, Mus musculus
GMEGLISPTEAVGNSCGASSSCPGWLR

SEQ ID NO: 1443 - protein, 37 aa, Mus musculus; identical to SEQ ID NO: 623

SEQ ID NO: 1444 - protein, 17 aa, Mus musculus
NSGPVSEVNTGFSPEVK

SEQ ID NO: 1445 - protein, 40 aa, Mus musculus
RGQEELEVPVDPLPSSPAQEALDLLFSCDSTEEASSSLAR

SEQ ID NO: 1446 - protein, 34 aa, Mus musculus
GVNFAEEPMRSDSENGEEEEAAEAGAFNAPVINR

SEQ ID NO: 1447 - protein, 31 aa, Mus musculus; identical to SEQ ID NO: 1349

SEQ ID NO: 1448 - protein, 44 aa, Mus musculus
GLLAQDLQAESSPPASPLLNGAPVQESSQPVAVPEASPPASPLR

SEQ ID NO: 1449 - protein, 14 aa, Mus musculus
GGGQSSPQEEPTWK

SEQ ID NO: 1450 - protein, 16 aa, Mus musculus
SGSGMSVISSSSVDQR

SEQ ID NO: 1451 - protein, 31 aa, Mus musculus
SPTLGEDSDTEVDEDHKPGFADSETDVEEER

SEQ ID NO: 1452 - protein, 23 aa, Mus musculus
VLTPTQVMNRPSSISWDGLDPGK

SEQ ID NO: 1453 - protein, 43 aa, Mus musculus
NIQQDNSEAGTQPQVQTDGQQTSQSPPSPELTSEESKTPDADK

SEQ ID NO: 1454 - protein, 11 aa, Mus musculus
EATLPPVSPPK

SEQ ID NO: 1455 - protein, 11 aa, Mus musculus
EATLPPVSPPK

SEQ ID NO: 1456 - protein, 14 aa, Mus musculus
RISWPENSFDFVSK

SEQ ID NO: 1457 - protein, 14 aa, Mus musculus
RISWPENSFDFVSK

SEQ ID NO: 1458 - protein, 12 aa, Mus musculus
KAEEATPVTALR

SEQ ID NO: 1459 - protein, 10 aa, Mus musculus
KIIETMSSPK

SEQ ID NO: 1460 - protein, 10 aa, Mus musculus
KIIETMSSPK

SEQ ID NO: 1461 - protein, 36 aa, Mus musculus; identical to SEQ ID NO: 1385

SEQ ID NO: 1462 - protein, 18 aa, Mus musculus
LKTEEGEIVYSAEESENR

SEQ ID NO: 1463 - protein, 38 aa, Mus musculus; identical to SEQ ID NO: 272

SEQ ID NO: 1464 - protein, 9 aa, Mus musculus
LGSFGSITR

SEQ ID NO: 1465 - protein, 9 aa, Mus musculus
LGSFGSITR

SEQ ID NO: 1466 - protein, 20 aa, Mus musculus
AEEQLPPLLSPPSPSTPHSR

SEQ ID NO: 1467 - protein, 19 aa, Mus musculus
DFTKPQDGDIIAPLITPLK

SEQ ID NO: 1468 - protein, 20 aa, Mus musculus
ALVIQESESPPSPPPSPDRR

SEQ ID NO: 1469 - protein, 35 aa, Mus musculus
RKPVLPALTINPTIAEGPSPTSEGASEANLVDLQK

SEQ ID NO: 1470 - protein, 34 aa, Mus musculus; identical to SEQ ID NO: 174

SEQ ID NO: 1471 - protein, 44 aa, Mus musculus; identical to SEQ ID NO: 1448

SEQ ID NO: 1472 - protein, 44 aa, Mus musculus; identical to SEQ ID NO: 1448

SEQ ID NO: 1473 - protein, 16 aa, Mus musculus
KPSSSPDLWKVSPDQR

SEQ ID NO: 1474 - protein, 29 aa, Mus musculus
ASPITNDGEDEFVPSDGLDKDEYAFSSGK

SEQ ID NO: 1475 - protein, 26 aa, Mus musculus
EVENEQTPVSEPEEEKGSQPGPPVER

SEQ ID NO: 1476 - protein, 25 aa, Mus musculus
LASEDAALVDDDEESDTPAQAPLAK

SEQ ID NO: 1477 - protein, 15 aa, Mus musculus
TASEGSEAETPEAPK

SEQ ID NO: 1478 - protein, 38 aa, Mus musculus; identical to SEQ ID NO: 272

SEQ ID NO: 1479 - protein, 38 aa, Mus musculus; identical to SEQ ID NO: 272

SEQ ID NO: 1480 - protein, 14 aa, Mus musculus
GGGQSSPQEEPTWK

SEQ ID NO: 1481 - protein, 31 aa, Mus musculus; identical to SEQ ID NO: 1235

SEQ ID NO: 1482 - protein, 40 aa, Mus musculus
VHEPPREDTVPPKPVPPVPPPTQHLQPEGDVSQQSGGSPR

SEQ ID NO: 1483 - protein, 32 aa, Mus musculus
AKSPQPPVEEEDEHFDDTVVCLDTYNCDLHFK

SEQ ID NO: 1484 - protein, 39 aa, Mus musculus
GPIQTLGHTDESASDKGPTQMPCNSLQPEQVDSFQSSPR

SEQ ID NO: 1485 - protein, 9 aa, Mus musculus
LGSFGSITR

SEQ ID NO: 1486 - protein, 9 aa, Mus musculus
LGSFGSITR

SEQ ID NO: 1487 - protein, 9 aa, Mus musculus
LGSFGSITR

SEQ ID NO: 1488 - protein, 9 aa, Mus musculus
LGSFGSITR

SEQ ID NO: 1489 - protein, 9 aa, Mus musculus
LGSFGSITR

SEQ ID NO: 1490 - protein, 26 aa, Mus musculus
MKESETFSDSSPIEIIDEFPTFVSAK

SEQ ID NO: 1491 - protein, 21 aa, Mus musculus
SSPKEEVASEPEEAASPTTPK

SEQ ID NO: 1492 - protein, 35 aa, Mus musculus
LSIMTSENHLNNSDKEVDEVDAALSDLEITLEGGK

SEQ ID NO: 1493 - protein, 29 aa, Mus musculus
RCPSTDPEEAVEDAEGPSEASADPEELAK

SEQ ID NO: 1494 - protein, 9 aa, Mus musculus
LGSFGSITR

SEQ ID NO: 1495 - protein, 9 aa, Mus musculus
LGSFGSITR

SEQ ID NO: 1496 - protein, 9 aa, Mus musculus
LGSFGSITR

SEQ ID NO: 1497 - protein, 9 aa, Mus musculus
LGSFGSITR

SEQ ID NO: 1498 - protein, 9 aa, Mus musculus
LGSFGSITR

SEQ ID NO: 1499 - protein, 9 aa, Mus musculus
LGSFGSITR

SEQ ID NO: 1500 - protein, 9 aa, Mus musculus
LGSFGSITR

SEQ ID NO: 1501 - protein, 31 aa, Mus musculus; identical to SEQ ID NO: 1235

SEQ ID NO: 1502 - protein, 19 aa, Mus musculus
VAAAAGSGPSPPCSPGHDR

SEQ ID NO: 1503 - protein, 19 aa, Mus musculus
VAAAAGSGPSPPCSPGHDR

SEQ ID NO: 1504 - protein, 34 aa, Mus musculus; identical to SEQ ID NO: 174

SEQ ID NO: 1505 - protein, 12 aa, Mus musculus
VVKEDGVMSPEK

SEQ ID NO: 1506 - protein, 42 aa, Mus musculus; identical to SEQ ID NO: 140

SEQ ID NO: 1507 - protein, 25 aa, Mus musculus
VNHEPEPASGASPGATIPKSPSQLR

SEQ ID NO: 1508 - protein, 25 aa, Mus musculus
VNHEPEPASGASPGATIPKSPSQLR

SEQ ID NO: 1509 - protein, 18 aa, Mus musculus
TPSPEPVDKDFYSEFGDK

SEQ ID NO: 1510 - protein, 31 aa, Mus musculus; identical to SEQ ID NO: 1235

SEQ ID NO: 1511 - protein, 31 aa, Mus musculus; identical to SEQ ID NO: 1235

SEQ ID NO: 1512 - protein, 18 aa, Mus musculus
ANSTSDSMFTETPSPVLK

SEQ ID NO: 1513 - protein, 14 aa, Mus musculus
FELLPTPPLSPSRR

SEQ ID NO: 1514 - protein, 23 aa, Mus musculus
EPAAPASPAPSPVPSPTPAQPQK

SEQ ID NO: 1515 - protein, 42 aa, Mus musculus; identical to SEQ ID NO: 140

SEQ ID NO: 1516 - protein, 17 aa, Mus musculus
TFSLDAAPADHSLGPSR

SEQ ID NO: 1517 - protein, 42 aa, Mus musculus; identical to SEQ ID NO: 140

SEQ ID NO: 1518 - protein, 9 aa, Mus musculus
LGSFGSITR

SEQ ID NO: 1519 - protein, 42 aa, Mus musculus
NSTHSNLHTSLGNSVWGSINTGPSNQWASELVSSIWSNADTK

SEQ ID NO: 1520 - protein, 22 aa, Mus musculus
TRSEPLPPSATASPLLAPLQPR

SEQ ID NO: 1521 - protein, 36 aa, Mus musculus; identical to SEQ ID NO: 1385

SEQ ID NO: 1522 - protein, 36 aa, Mus musculus; identical to SEQ ID NO: 1385

SEQ ID NO: 1523 - protein, 36 aa, Mus musculus; identical to SEQ ID NO: 1385

SEQ ID NO: 1524 - protein, 26 aa, Mus musculus
DHNSEDEDEDKYADDIDMPGQNFDSK

SEQ ID NO: 1525 - protein, 14 aa, Mus musculus
RQSGTDLQEDVIVR

SEQ ID NO: 1526 - protein, 21 aa, Mus musculus
TTSFAESCKPVQQPSAFGSMK

SEQ ID NO: 1527 - protein, 15 aa, Mus musculus
SLSFSEPQQPPPTVK

SEQ ID NO: 1528 - protein, 25 aa, Mus musculus
DKDDQEWESTSPPKPTVFISGVIAR

SEQ ID NO: 1529 - protein, 18 aa, Mus musculus
SPVVITIDSDSDGESEVK

SEQ ID NO: 1530 - protein, 20 aa, Mus musculus
INDELEGLGLEGGSEGEAPR

SEQ ID NO: 1531 - protein, 20 aa, Mus musculus
INDELEGLGLEGGSEGEAPR

SEQ ID NO: 1532 - protein, 31 aa, Mus musculus; identical to SEQ ID NO: 1235

SEQ ID NO: 1533 - protein, 31 aa, Mus musculus; identical to SEQ ID NO: 1235

SEQ ID NO: 1534 - protein, 32 aa, Mus musculus
ISENYSDKSDVENADESSSSILKPLISPAAER

SEQ ID NO: 1535 - protein, 21 aa, Mus musculus
GPSEAPQEAEAEEGATSDGEK

SEQ ID NO: 1536 - protein, 26 aa, Mus musculus
HLLTDLPLPPELPGGDPSPPDSPEPK

SEQ ID NO: 1537 - protein, 26 aa, Mus musculus
SDLIEDEELEDTGKGSEDEWEQVGPK

SEQ ID NO: 1538 - protein, 11 aa, Mus musculus
EATLPPVSPPK

SEQ ID NO: 1539 - protein, 31 aa, Mus musculus
KGLVAASGSDSEDEDSMDSPLDLSSSAASGK

SEQ ID NO: 1540 - protein, 16 aa, Mus musculus
TGSESSQTGASATSGR

SEQ ID NO: 1541 - protein, 20 aa, Mus musculus
ALVIQESESPPSPPPSPDRR

SEQ ID NO: 1542 - protein, 33 aa, Mus musculus
MLPHAPGVQMQAIPEDAVHEDSGDEDGEDPDKR

SEQ ID NO: 1543 - protein, 44 aa, Mus musculus; identical to SEQ ID NO: 339

SEQ ID NO: 1544 - protein, 44 aa, Mus musculus; identical to SEQ ID NO: 339

SEQ ID NO: 1545 - protein, 44 aa, Mus musculus; identical to SEQ ID NO: 339

SEQ ID NO: 1546 - protein, 17 aa, Mus musculus
MSSHTETSSFLQTLTGR

SEQ ID NO: 1547 - protein, 17 aa, Mus musculus
MSSHTETSSFLQTLTGR

SEQ ID NO: 1548 - protein, 17 aa, Mus musculus
MSSHTETSSFLQTLTGR

SEQ ID NO: 1549 - protein, 31 aa, Mus musculus; identical to SEQ ID NO: 1235

SEQ ID NO: 1550 - protein, 31 aa, Mus musculus; identical to SEQ ID NO: 1235

SEQ ID NO: 1551 - protein, 10 aa, Mus musculus
SPSLLQSGVK

SEQ ID NO: 1552 - protein, 12 aa, Mus musculus
STSPIIGSPPVR

SEQ ID NO: 1553 - protein, 17 aa, Mus musculus
MSSHTETSSFLQTLTGR

SEQ ID NO: 1554 - protein, 14 aa, Mus musculus
LPSMGDQEPPGQEK

SEQ ID NO: 1555 - protein, 35 aa, Mus musculus; identical to SEQ ID NO: 395

SEQ ID NO: 1556 - protein, 44 aa, Mus musculus
LSEGEPGPVAAGEQLSEHPVEDPESLGVEAETWMNKSPDGMSPK

SEQ ID NO: 1557 - protein, 21 aa, Mus musculus
TTSFAESCKPVQQPSAFGSMK

SEQ ID NO: 1558 - protein, 21 aa, Mus musculus
TTSFAESCKPVQQPSAFGSMK

SEQ ID NO: 1559 - protein, 21 aa, Mus musculus
TTSFAESCKPVQQPSAFGSMK

SEQ ID NO: 1560 - protein, 39 aa, Mus musculus; identical to SEQ ID NO: 543

SEQ ID NO: 1561 - protein, 19 aa, Mus musculus
SPAPSNPTLSPSTPAKTPK

SEQ ID NO: 1562 - protein, 19 aa, Mus musculus
SPAPSNPTLSPSTPAKTPK

SEQ ID NO: 1563 - protein, 22 aa, Mus musculus
SSSAPNVHINTIEPVNIDDLIR

SEQ ID NO: 1564 - protein, 18 aa, Mus musculus
KLDESPVLKPEFIGHDGR

SEQ ID NO: 1565 - protein, 18 aa, Mus musculus
KLDESPVLKPEFIGHDGR

SEQ ID NO: 1566 - protein, 23 aa, Mus musculus
LLDGPTGSSEEEEEFLEIPPFNK

SEQ ID NO: 1567 - protein, 22 aa, Mus musculus
SSSAPNVHINTIEPVNIDDLIR

SEQ ID NO: 1568 - protein, 27 aa, Mus musculus
DGSGTPSRHSLSGSSPGMKDTPQTPSR

SEQ ID NO: 1569 - protein, 29 aa, Mus musculus
VQIPVSHPDPEPVSDNEDDSYDEEVHDPR

SEQ ID NO: 1570 - protein, 31 aa, Mus musculus; identical to SEQ ID NO: 1235

SEQ ID NO: 1571 - protein, 18 aa, Mus musculus
HIVSNDSSDSDDEAQGPK

SEQ ID NO: 1572 - protein, 26 aa, Mus musculus
EVHDELEDLPSPPPPLSPPPTTSPHK

SEQ ID NO: 1573 - protein, 26 aa, Mus musculus
EVHDELEDLPSPPPPLSPPPTTSPHK

SEQ ID NO: 1574 - protein, 17 aa, Mus musculus
AEDSGAEQLASEIEPSR

SEQ ID NO: 1575 - protein, 17 aa, Mus musculus
AEDSGAEQLASEIEPSR

SEQ ID NO: 1576 - protein, 19 aa, Mus musculus
SPPACSSSSSSLFSAVVAR

SEQ ID NO: 1577 - protein, 41 aa, Mus musculus
GPPSEDEGMDIHFEEGVLSPSAADMRPEPPNSLDLNGSHPR

SEQ ID NO: 1578 - protein, 41 aa, Mus musculus; identical to SEQ ID NO: 1577

SEQ ID NO: 1579 - protein, 17 aa, Mus musculus
SGITSLLFGEDDLEALK

SEQ ID NO: 1580 - protein, 20 aa, Mus musculus
VLSDSEEEEKDADVPGTSTR

SEQ ID NO: 1581 - protein, 25 aa, Mus musculus
GHYEVTGSDDEAGKLQGSGVSLASK

SEQ ID NO: 1582 - protein, 25 aa, Mus musculus
GHYEVTGSDDEAGKLQGSGVSLASK

SEQ ID NO: 1583 - protein, 26 aa, Mus musculus
RDSICSSVSMESSLAEPQDELLQILK

SEQ ID NO: 1584 - protein, 33 aa, Mus musculus
ALENGEADEPSFSDPEDFVDDVSEEELLGDVLK

SEQ ID NO: 1585 - protein, 24 aa, Mus musculus
DRSSSAPNVHINTIEPVNIDDLIR

SEQ ID NO: 1586 - protein, 24 aa, Mus musculus
DRSSSAPNVHINTIEPVNIDDLIR

SEQ ID NO: 1587 - protein, 21 aa, Mus musculus
TTSFAESCKPVQQPSAFGSMK

SEQ ID NO: 1588 - protein, 33 aa, Mus musculus
RGNNSAVGSNADLTIEEDEEEEPVALQQAQQVR

SEQ ID NO: 1589 - protein, 17 aa, Mus musculus
MSSHTETSSFLQTLTGR

SEQ ID NO: 1590 - protein, 31 aa, Mus musculus; identical to SEQ ID NO: 1235

SEQ ID NO: 1591 - protein, 9 aa, Mus musculus
GPILATPGK

SEQ ID NO: 1592 - protein, 9 aa, Mus musculus
GPILATPGK

SEQ ID NO: 1593 - protein, 9 aa, Mus musculus
GPILATPGK

SEQ ID NO: 1594 - protein, 9 aa, Mus musculus
GPILATPGK

SEQ ID NO: 1595 - protein, 14 aa, Mus musculus
KESAPQVLLPEEEK

SEQ ID NO: 1596 - protein, 30 aa, Mus musculus
LQEEGGSEEEEAGNPSEDGMQSGPTQAPPR

SEQ ID NO: 1597 - protein, 12 aa, Mus musculus
VVKEDGVMSPEK

SEQ ID NO: 1598 - protein, 39 aa, Mus musculus
ARQPSQADTGEEDSDEDYEKVPLPNSVFVNTTESCEVER

SEQ ID NO: 1599 - protein, 22 aa, Mus musculus
YDLSNQDHIMDAPPLSPFPHIK

SEQ ID NO: 1600 - protein, 22 aa, Mus musculus
YDLSNQDHIMDAPPLSPFPHIK

SEQ ID NO: 1601 - protein, 39 aa, Mus musculus; identical to SEQ ID NO: 543

SEQ ID NO: 1602 - protein, 17 aa, Mus musculus
SLSSPTVTLSAPLEGAK

SEQ ID NO: 1603 - protein, 42 aa, Mus musculus
VIEDEDGAAAAATVSNSEETPIIENHNSPQPISDVSAVPCPR

SEQ ID NO: 1604 - protein, 19 aa, Mus musculus
TTPAPSPGSANESFFAPSR

SEQ ID NO: 1605 - protein, 19 aa, Mus musculus
TTPAPSPGSANESFFAPSR

SEQ ID NO: 1606 - protein, 19 aa, Mus musculus
TTPAPSPGSANESFFAPSR

SEQ ID NO: 1607 - protein, 21 aa, Mus musculus
LGSTGSQPNSEAEPGPEHAPK

SEQ ID NO: 1608 - protein, 31 aa, Mus musculus; identical to SEQ ID NO: 1235

SEQ ID NO: 1609 - protein, 20 aa, Mus musculus
ALVIQESESPPSPPPSPDRR

SEQ ID NO: 1610 - protein, 18 aa, Mus musculus
TDQEGLNASQPTPPPLPK

SEQ ID NO: 1611 - protein, 31 aa, Mus musculus; identical to SEQ ID NO: 1235

SEQ ID NO: 1612 - protein, 18 aa, Mus musculus
RASDGGANIQLHAQQLLK

SEQ ID NO: 1613 - protein, 33 aa, Mus musculus; identical to SEQ ID NO: 1409

SEQ ID NO: 1614 - protein, 25 aa, Mus musculus
FKGPGDTSNFDDYEEEEIRVSINEK

SEQ ID NO: 1615 - protein, 42 aa, Mus musculus
VDPTYGLESSCIAGTGPDEPEKLEGSEEEKMETDPDGQQPEK

SEQ ID NO: 1616 - protein, 8 aa, Mus musculus
KLSFSMPR

SEQ ID NO: 1617 - protein, 22 aa, Mus musculus
LDFLPEMMVDHCSLNSSPVSKK

SEQ ID NO: 1618 - protein, 36 aa, Mus musculus; identical to SEQ ID NO: 1056

SEQ ID NO: 1619 - protein, 16 aa, Mus musculus
TGSESSQTGASATSGR

SEQ ID NO: 1620 - protein, 27 aa, Mus musculus
TASISSSPSEGTPAVGSYGCTPQSLPK

SEQ ID NO: 1621 - protein, 27 aa, Mus musculus
TASISSSPSEGTPAVGSYGCTPQSLPK

SEQ ID NO: 1622 - protein, 27 aa, Mus musculus
TASISSSPSEGTPAVGSYGCTPQSLPK

SEQ ID NO: 1623 - protein, 18 aa, Mus musculus
AESPETSAVESTQSTPQK

SEQ ID NO: 1624 - protein, 22 aa, Mus musculus
TSDIFGSPVTATAPLAHPNKPK

SEQ ID NO: 1625 - protein, 6 aa, Mus musculus
RLSSLR

SEQ ID NO: 1626 - protein, 13 aa, Mus musculus
RSSSELSPEVVEK

SEQ ID NO: 1627 - protein, 22 aa, Mus musculus
SSSGSEHSTEGSVSLGDGPLSR

SEQ ID NO: 1628 - protein, 22 aa, Mus musculus
SSSGSEHSTEGSVSLGDGPLSR

SEQ ID NO: 1629 - protein, 13 aa, Mus musculus
RSSSELSPEVVEK

SEQ ID NO: 1630 - protein, 13 aa, Mus musculus
TTPLASPSLSPGR

SEQ ID NO: 1631 - protein, 17 aa, Mus musculus
THSTSSSIGSGESPFSR

SEQ ID NO: 1632 - protein, 17 aa, Mus musculus
THSTSSSIGSGESPFSR

SEQ ID NO: 1633 - protein, 17 aa, Mus musculus
THSTSSSIGSGESPFSR

SEQ ID NO: 1634 - protein, 17 aa, Mus musculus
THSTSSSIGSGESPFSR

SEQ ID NO: 1635 - protein, 17 aa, Mus musculus
THSTSSSIGSGESPFSR

SEQ ID NO: 1636 - protein, 17 aa, Mus musculus
THSTSSSIGSGESPFSR

SEQ ID NO: 1637 - protein, 17 aa, Mus musculus
THSTSSSIGSGESPFSR

SEQ ID NO: 1638 - protein, 17 aa, Mus musculus
THSTSSSIGSGESPFSR

SEQ ID NO: 1639 - protein, 17 aa, Mus musculus
THSTSSSIGSGESPFSR

SEQ ID NO: 1640 - protein, 14 aa, Mus musculus
ERQESESEQELVNK

SEQ ID NO: 1641 - protein, 17 aa, Mus musculus
TSPAGGTWSSVVSGVPR

SEQ ID NO: 1642 - protein, 22 aa, Mus musculus
SKFDSDEEDEDAENLEAVSSGK

SEQ ID NO: 1643 - protein, 23 aa, Mus musculus
DTVIIVSEPSEDEESHDLPSVTR

SEQ ID NO: 1644 - protein, 20 aa, Mus musculus
GTSRPGTPSAEAASTSSTLR

SEQ ID NO: 1645 - protein, 28 aa, Mus musculus
GCSPPKSPEKPPQSTSSESCPPSPQPTK

SEQ ID NO: 1646 - protein, 23 aa, Mus musculus
VMTIPYQPMPASSPVICAGGQDR

SEQ ID NO: 1647 - protein, 21 aa, Mus musculus
LSTTPSPTNSLHEDGVDDFRR

SEQ ID NO: 1648 - protein, 35 aa, Mus musculus; identical to SEQ ID NO: 615

SEQ ID NO: 1649 - protein, 27 aa, Mus musculus
SAPASPNHAGVLSAHSSGAQTPESLSR

SEQ ID NO: 1650 - protein, 18 aa, Mus musculus
SRDATPPVSPINMEDQER

SEQ ID NO: 1651 - protein, 24 aa, Mus musculus
TTEAPCSPGSQQPPSPDELPANVK

SEQ ID NO: 1652 - protein, 28 aa, Mus musculus
GCSPPKSPEKPPQSTSSESCPPSPQPTK

SEQ ID NO: 1653 - protein, 20 aa, Mus musculus
GTSRPGTPSAEAASTSSTLR

SEQ ID NO: 1654 - protein, 32 aa, Mus musculus; identical to SEQ ID NO: 618

SEQ ID NO: 1655 - protein, 20 aa, Mus musculus
GTSRPGTPSAEAASTSSTLR

SEQ ID NO: 1656 - protein, 20 aa, Mus musculus
GTSRPGTPSAEAASTSSTLR

SEQ ID NO: 1657 - protein, 27 aa, Mus musculus
TASISSSPSEGTPAVGSYGCTPQSLPK

SEQ ID NO: 1658 - protein, 27 aa, Mus musculus
TASISSSPSEGTPAVGSYGCTPQSLPK

SEQ ID NO: 1659 - protein, 9 aa, Mus musculus
RSESPFEGK

SEQ ID NO: 1660 - protein, 26 aa, Mus musculus
GLNLDGTPALSTLGGFSPASKPSSPR

SEQ ID NO: 1661 - protein, 26 aa, Mus musculus
GLNLDGTPALSTLGGFSPASKPSSPR

SEQ ID NO: 1662 - protein, 26 aa, Mus musculus
GLNLDGTPALSTLGGFSPASKPSSPR

SEQ ID NO: 1663 - protein, 26 aa, Mus musculus
GLNLDGTPALSTLGGFSPASKPSSPR

SEQ ID NO: 1664 - protein, 34 aa, Mus musculus; identical to SEQ ID NO: 584

SEQ ID NO: 1665 - protein, 26 aa, Mus musculus
GLNLDGTPALSTLGGFSPASKPSSPR

SEQ ID NO: 1666 - protein, 26 aa, Mus musculus
GLNLDGTPALSTLGGFSPASKPSSPR

SEQ ID NO: 1667 - protein, 24 aa, Mus musculus
SLVSPIPSPTGTISVPNSCPASPR

SEQ ID NO: 1668 - protein, 24 aa, Mus musculus
SLVSPIPSPTGTISVPNSCPASPR

SEQ ID NO: 1669 - protein, 24 aa, Mus musculus
TTEAPCSPGSQQPPSPDELPANVK

SEQ ID NO: 1670 - protein, 32 aa, Mus musculus; identical to SEQ ID NO: 618

SEQ ID NO: 1671 - protein, 32 aa, Mus musculus; identical to SEQ ID NO: 618

SEQ ID NO: 1672 - protein, 22 aa, Mus musculus
SYQNSPSSEDGIRPLPEYSTEK

SEQ ID NO: 1673 - protein, 28 aa, Mus musculus
GCSPPKSPEKPPQSTSSESCPPSPQPTK

SEQ ID NO: 1674 - protein, 42 aa, Mus musculus; identical to SEQ ID NO: 140

SEQ ID NO: 1675 - protein, 25 aa, Mus musculus
SLMSSPEDLTKDFEELKAEEIDVAK

SEQ ID NO: 1676 - protein, 15 aa, Mus musculus
SSEVVLSGDDEDYQR

SEQ ID NO: 1677 - protein, 23 aa, Mus musculus
ATSRPINLGPSSPNTEIHWTPYR

SEQ ID NO: 1678 - protein, 23 aa, Mus musculus
ATSRPINLGPSSPNTEIHWTPYR

SEQ ID NO: 1679 - protein, 18 aa, Mus musculus
TISAQDTLAYATALLNEK

SEQ ID NO: 1680 - protein, 24 aa, Mus musculus
LHYTPPLQSPITDGDPLLGQSPWR

SEQ ID NO: 1681 - protein, 12 aa, Mus musculus
STSPIIGSPPVR

SEQ ID NO: 1682 - protein, 19 aa, Mus musculus
CSPVPGLSSSPSGSPLHGK

SEQ ID NO: 1683 - protein, 26 aa, Mus musculus
LGEQGPEPGPTPPQTPTPPSTPPLAK

SEQ ID NO: 1684 - protein, 13 aa, Mus musculus
RSTSPIIGSPPVR

SEQ ID NO: 1685 - protein, 13 aa, Mus musculus
RSTSPIIGSPPVR

SEQ ID NO: 1686 - protein, 12 aa, Mus musculus
STSPIIGSPPVR

SEQ ID NO: 1687 - protein, 34 aa, Mus musculus; identical to SEQ ID NO: 192

SEQ ID NO: 1688 - protein, 34 aa, Mus musculus; identical to SEQ ID NO: 192

SEQ ID NO: 1689 - protein, 24 aa, Mus musculus
SLVSPIPSPTGTISVPNSCPASPR

SEQ ID NO: 1690 - protein, 23 aa, Mus musculus
RVSTDLPEGQDVYTAACNSVIHR

SEQ ID NO: 1691 - protein, 15 aa, Mus musculus
DWDKESEGEEPAGGR

SEQ ID NO: 1692 - protein, 19 aa, Mus musculus
RDSSDDWEIPDGQITVGQR

SEQ ID NO: 1693 - protein, 31 aa, Mus musculus; identical to SEQ ID NO: 153

SEQ ID NO: 1694 - protein, 17 aa, Mus musculus
ASDDLGEPDVFATAPFR

SEQ ID NO: 1695 - protein, 31 aa, Mus musculus; identical to SEQ ID NO: 153

SEQ ID NO: 1696 - protein, 31 aa, Mus musculus; identical to SEQ ID NO: 153

SEQ ID NO: 1697 - protein, 31 aa, Mus musculus; identical to SEQ ID NO: 153

SEQ ID NO: 1698 - protein, 16 aa, Mus musculus
SMDVDLNQAHMEDTPK

SEQ ID NO: 1699 - protein, 37 aa, Mus musculus; identical to SEQ ID NO: 1320

SEQ ID NO: 1700 - protein, 14 aa, Mus musculus
TASGSSVTSLEGTR

SEQ ID NO: 1701 - protein, 32 aa, Mus musculus; identical to SEQ ID NO: 163

SEQ ID NO: 1702 - protein, 16 aa, Mus musculus
ISSKSPGHMVILNQTK

SEQ ID NO: 1703 - protein, 19 aa, Mus musculus
DFTKPQDGDIIAPLITPLK

SEQ ID NO: 1704 - protein, 15 aa, Mus musculus
TASEGSEAETPEAPK

SEQ ID NO: 1705 - protein, 9 aa, Mus musculus
LGSFGSITR

SEQ ID NO: 1706 - protein, 15 aa, Mus musculus
SLSFSEPQQPPPTVK

SEQ ID NO: 1707 - protein, 44 aa, Mus musculus; identical to SEQ ID NO: 339

SEQ ID NO: 1708 - protein, 44 aa, Mus musculus; identical to SEQ ID NO: 339

SEQ ID NO: 1709 - protein, 44 aa, Mus musculus; identical to SEQ ID NO: 339

SEQ ID NO: 1710 - protein, 17 aa, Mus musculus
MSSHTETSSFLQTLTGR

SEQ ID NO: 1711 - protein, 27 aa, Mus musculus
DGSGTPSRHSLSGSSPGMKDTPQTPSR

SEQ ID NO: 1712 - protein, 24 aa, Mus musculus
DRSSSAPNVHINTIEPVNIDDLIR

SEQ ID NO: 1713 - protein, 33 aa, Mus musculus; identical to SEQ ID NO: 1588

SEQ ID NO: 1714 - protein, 33 aa, Mus musculus; identical to SEQ ID NO: 1588

SEQ ID NO: 1715 - protein, 17 aa, Mus musculus
SLSSPTVTLSAPLEGAK

SEQ ID NO: 1716 - protein, 10 aa, Mus musculus
RPPSPDPNTK

SEQ ID NO: 1717 - protein, 21 aa, Mus musculus
AKQPVIGDQNSDSDEMLAVLK

SEQ ID NO: 1718 - protein, 13 aa, Mus musculus
SLPTTVPESPNYR

SEQ ID NO: 1719 - protein, 21 aa, Mus musculus
TTSFAESCKPVQQPSAFGSMK

SEQ ID NO: 1720 - protein, 541 aa, Mus musculus
MNNDINSSVESLNSACNMQSDTDTAPLLEDGQHASNQGAASSSRGQPQASPRQKMQRSQPVHILRRLQEEDQQLRTASLPAIPNPFPELTGAAPGSPPSVAPSSLPPPPSQPPAKHDVKVFSEDGTSKVVEILTDMTARDLCQLLVYKSHCVDDNSWTLVEHHPQLGLERCLEDHEIVVQVESTMPSESKFLFRKNYAKYEFFKNPVNFFPDQMVNWCQQSNGGQAQLLQNFLNTSSCPEIQGFLQVKEVGRKSWKKLYVCLRRSGLYYSTKGTSKEPRHLQLLADLEESSIFYLIAGKKQYNAPNEHGMCIKPNKAKTEMKELRLLCAEDEQIRTCWMTAFRLLKYGMLLYQNYRIPQRKGLPPPFNAPMRSVSENSLVAMDFSGQIGRVIDNPAEAQSAALEEGHAWRKRSTRMNILSSQSPLHPSTLNAVIHRTQHWFHGRISREESHRIIKQQGLVDGLFLLRDSQSNPKAFVLTLCHHQKIKNFQILPCEDDGQTFFTLDDGNTKFSDLIQLVDFYQLNKGVLPCKLKHHCIRVAL

SEQ ID NO: 1721 - protein, 596 aa, Mus musculus
MNNDINSSVESLNSACNMQSDTDTAPLLEDGQHASNQGAASSSRGQPQASPRQKMQRSQPVHILRRLQEEDQQLRTASLPAIPNPFPELTGAAPGSPPSVAPSSLPPPPSQPPAKHFPPGFQLSKLTRPGLWTKTTARFSKKQPKNQCPTDTVNPVARMPTSQMEKLRLRKDVKVFSEDGTSKVVEILTDMTARDLCQLLVYKSHCVDDNSWTLVEHHPQLGLERCLEDHEIVVQVESTMPSESKFLFRKNYAKYEFFKNPVNFFPDQMVNWCQQSNGGQAQLLQNFLNTSSCPEIQGFLQVKEVGRKSWKKLYVCLRRSGLYYSTKGTSKEPRHLQLLADLEESSIFYLIAGKKQYNAPNEHGMCIKPNKAKTEMKELRLLCAEDEQIRTCWMTAFRLLKYGMLLYQNYRIPQRKGLPPPFNAPMRSVSENSLVAMDFSGQIGRVIDNPAEAQSAALEEGHAWRKRSTRMNILSSQSPLHPSTLNAVIHRTQHWFHGRISREESHRIIKQQGLVDGLFLLRDSQSNPKAFVLTLCHHQKIKNFQILPCEDDGQTFFTLDDGNTKFSDLIQLVDFYQLNKGVLPCKLKHHCIRVAL

SEQ ID NO: 1722 - protein, 17 aa, Mus musculus
RLSSLRASTSKSESSQK

SEQ ID NO: 1723 - protein, 21 aa, Homo sapiens
STRMNILGSQSPLHPSTLSTV

SEQ ID NO: 1724 - protein, 21 aa, Mus musculus
STRMNILSSQSPLHPSTLNAV

SEQ ID NO: 1725 - protein, 21 aa, Sus scrofa
STRMNILGSQSPLHPSTLSTV

SEQ ID NO: 1726 - protein, 21 aa, Gallus gallus
STRMNILGSQSPLHPSTLSTV

SEQ ID NO: 1727 - protein, 21 aa, Xenopus tropicalis
SSRLNVLGSQSPLHPSTLSTV

SEQ ID NO: 1728 - protein, 24 aa, Homo sapiens
TGTTVPESIHSFIGDGLVKPEALN

SEQ ID NO: 1729 - protein, 24 aa, Mus musculus
AGTTVPESIHSFIGDGLVKPEALN

SEQ ID NO: 1730 - protein, 24 aa, Rattus norvegicus
TGTTVPESIHSFIGDGLVKPEALN

SEQ ID NO: 1731 - protein, 24 aa, Gallus gallus
TGTTVPESIHSFIGDGLVKPEALN

SEQ ID NO: 1732 - protein, 24 aa, Danio rerio
PGTTVPESIHSFIGDGLVQPEALN

SEQ ID NO: 1733 - protein, 24 aa, Drosophila melanogaster
AKSKPYDRTLQQGGLHNNVADETN

SEQ ID NO: 1734 - protein, 9 aa, Saccharomyces cerevisiae
AEQQNETRN

SEQ ID NO: 1735 - protein, 9 aa, Saccharomyces cerevisiae
NEHKNAIRN

SEQ ID NO: 1736 - protein, 21 aa, Mus musculus
MNILSSQSPLHPSTLNAVIHR

SEQ ID NO: 1737 - protein, 20 aa, Mus musculus
RSVSENSLVAMDFSGQIGRV
